(19) United States
(12) Patent Application Publication
(10) Pub. No.: US 2021/0024921 A1
(43) Pub. Date: Jan. 28, 2021

(54) Methods and Compositions for Generating a Deletion Library and for Identifying a Defective Interfering Particle (DIP)

(71) Applicants: The J. David Gladstone Institutes, a testamentary trust established under theWill ofJ.DavidGladstone, San Francisco, CA (US); The Regents of the University of California, Oakland, CA (US)

(72) Inventors: Leor S. Weinberger, Oakland, CA (US); Timothy J. Notton, San Francisco, CA (US)

(21) Appl. No.: 16/467,233

(22) PCT Filed: Dec. 14, 2017
(86) PCT No.: PCT/US2017/066462

§ 371 Date: Jun. 6, 2019

Related U.S. Application Data
(60) Provisional application No. 62/434,322, filed on Dec. 14, 2016.

(51) Int. Cl. C12N 15/10; C12Q 1/6806; C12Q 1/6869

(52) U.S. Cl. CPC C12N 15/1082; C12Q 2563/185; C12Q 1/6869; C12Q 1/6806

(57) ABSTRACT

Provided are methods and compositions for generating a deletion library, and methods and compositions for generating and identifying a defective interfering particle (DIP). Also provided are transposon cassettes. A subject method can include: inserting a transposon cassette comprising a target sequence for a sequence specific DNA endonuclease into a population of circular target DNAs to generate a population of transposon-inserted circular target DNAs; contacting the population of transposon-inserted circular target DNAs with the sequence specific DNA endonuclease to generate a population of cleaved linear target DNAs; contacting the population of cleaved linear target DNAs with one or more exonucleases to generate a population of deletion DNAs; and circularizing the deletion DNAs to generate a library of circularized deletion DNAs. The population of circular target DNAs can include viral genomic DNA. Also provided are human immunodeficiency virus (HIV) deletion mutants, e.g., interfering, conditionally replicating, HIV deletion mutants, and related constructs.

### CROSS-REFERENCE

[0001] This application is a U.S. National Stage entry of International Application No. PCT/US2017/066462, which claims the benefit of U.S. Provisional Patent Application No. 62/434,322, filed Dec. 14, 2016, the disclosures of which applications are incorporated herein by reference in their entirety.

### STATEMENT REGARDING FEDERALLY SPONSORED RESEARCH

[0002] This invention was made with government support under Grant Nos. 0D006677 and OD017181, awarded by the National Institutes of Health, and Grant No. D15AP00024, awarded by the Defense Advanced Research Projects Agency. The government has certain rights in the invention.

### INCORPORATION BY REFERENCE OF SEQUENCE LISTING PROVIDED AS A TEXT FILE

[0003] A Sequence Listing is provided herewith as a text file, “GLAD-425WO SeqList_ST25.txt” created on Dec. 13, 2017 and having a size of 675 KB. The contents of the text file are incorporated by reference herein in their entirety.

### INTRODUCTION

[0004] Circular DNAs, e.g., plasmids, have become a ubiquitous tool in molecular biology. There is a need in the art for additional methods and compositions for manipulating circular target DNAs for a variety of purposes. For example, there is a need for methods and compositions that facilitate the generation of deletion libraries (e.g., libraries of circular DNAs in which members of the library include one or more deletions at different locations relative to other members of the library).

### SUMMARY

[0005] Provided are methods and compositions for generating a deletion library. In some embodiments, a subject method includes: (a) inserting a transposon cassette comprising a target sequence for a sequence specific DNA endonuclease into a population of circular target DNAs to generate a population of transposon-inserted circular target DNAs; (b) contacting the population of transposon-inserted circular target DNAs with the sequence specific DNA endonuclease to generate a population of cleaved linear target DNAs; (c) contacting the population of cleaved linear target DNAs with one or more exonucleases to generate a population of deletion DNAs; and (d) circularizing the deletion DNAs to generate a library of circularized deletion DNAs. In some cases, the transposon cassette includes a first recognition sequence positioned at or near one end of the transposon cassette and a second recognition sequence positioned at or near the other end of the transposon cassette.

[0006] In some embodiments, the circular target DNAs are plasmids that comprise a viral genome. In some such cases, the method further includes introducing members of the library of circularized deletion DNAs into mammalian cells, and assaying for viral infectivity. In some cases, the method further includes sequencing members of the library of circularized deletion DNAs to identify defective interfering particles (DIPs).

[0007] In some cases, the sequence specific DNA endonuclease is selected from: a meganuclease, a CRISPR/Cas endonuclease, a zinc finger nuclease, or a TALEN. In some cases, the one or more exonucleases includes T4 DNA polymerase. In some cases, the one or more exonucleases includes a 3′ to 5′ exonuclease and a 5′ to 3′ exonuclease. In some cases, the one or more exonucleases includes RecJ. In some cases, a subject method includes inserting a barcode sequence prior to or simultaneous with step (d). In some cases, the step of contacting the population of cleaved linear target DNAs with one or more exonucleases is performed in the presence of a single strand binding protein (SSB).

[0008] Also provided are methods of generating and identifying a defective interfering particle (DIP). In some cases, such a subject method includes (a) inserting a target sequence for a sequence specific DNA endonuclease into a population of circular target viral DNAs, each comprising a viral genome, to generate a population of sequence-inserted viral DNAs; (b) contacting the population of sequence-inserted viral DNAs with the sequence specific DNA endonuclease to generate a population of cleaved linear viral DNAs; (c) contacting the population of cleaved linear viral DNAs with an exonuclease to generate a population of deletion DNAs; (d) circularizing the deletion DNAs to generate a library of circularized deletion viral DNAs; and (e) sequencing members of the library of circularized deletion viral DNAs to identify deletion interfering particles (DIPs). In some cases, the method includes inserting a barcode sequence prior to or simultaneous with step (d).

[0009] In some cases, the method includes introducing members of the generated library of circularized deletion DNAs into cells, e.g., mammalian cells, and assaying for viral infectivity. In some cases, the inserting of step (a) includes inserting a transposon cassette into the population of circular target viral DNAs, where the transposon cassette includes the target sequence for the sequence specific DNA endonuclease, and wherein said generated population of sequence-inserted viral DNAs is a population of transposon-inserted viral DNAs. In some cases, the method includes, after step (d), infecting cells, e.g., mammalian cells in culture with members of the library of circularized deletion viral DNAs at a high multiplicity of infection (MOI), culturing the infected cells for a period of time ranging from 12 hours to 2 days, adding naive cells to the to the culture, and harvesting virus from the cells in culture. In some cases, the method includes, after step (d), infecting cells, e.g., mammalian cells in culture with members of the library of circularized deletion viral DNAs at a low multiplicity of infection (MOI), culturing the infected cells in the presence of an inhibitor of viral replication for a period of time ranging from 1 day to 6 days, infecting the cultured cells with functional virus at a high MOI, culturing the infected cells for a period of time ranging from 12 hours to 4 days, and harvesting virus from the cultured cells.

[0010] Also provided are transposon cassettes, which may be utilized, for example, in the methods described herein. In some embodiments a subject transposon cassette is a DNA molecule that includes transposase compatible inverted terminal repeats (ITRs) flanking a sequence of interest, wherein the sequence of interest includes a first copy and a second copy of a recognition sequence for a first meganuclease. In some cases the transposase compatible inverted terminal repeats (ITRs) are cable of being recognized and utilized by a Tn5 transposase. In some cases the sequence of interest includes a selectable marker gene, and the first and second copies flank the selectable marker gene. In some cases the selectable marker gene encodes an antibiotic resistance protein. In some cases the transposon cassette includes a first copy and a second copy of a recognition sequence for a second meganuclease. In some cases the first and second copies of the recognition sequence for the second meganuclease flank a selectable marker gene. In some cases the transposase compatible inverted terminal repeats (ITRs) are cable of being recognized and utilized by a Tn5 transposase.

[0011] Also provided are human immunodeficiency virus (HIV) deletion mutants, e.g., interfering, conditionally replicating, HIV deletion mutants, and related constructs identified using the screening methods described herein.

### BRIEF DESCRIPTION OF THE DRAWINGS

[0012] The invention is best understood from the following detailed description when read in conjunction with the accompanying drawings. It is emphasized that, according to common practice, the various features of the drawings are not to-scale. On the contrary, the dimensions of the various features are arbitrarily expanded or reduced for clarity. Included in the drawings are the following figures.

[0013] FIG. 1 provides a schematic representation of one embodiment of a method of generating a deletion library. The depicted use of a barcode to tag the deletion is optional.

[0014] FIG. 2 provides a schematic representation of a circular target DNA that includes a wildtype viral genome, in this case the NL4-3 provirus of HIV-1.

[0015] FIG. 3 provides a schematic representation of two examples of transposon cassettes that can be used in the subject methods. Note: “MOD2*-Kan^{R}” is referred to as “TN5MK” in FIG. 20 and “MOD2*-Cm^{R}” is referred to as “TN5MC” in FIG. 20.

[0016] FIG. 4 provides sequence information for a portion of one example of a subject transposon cassette. The depicted stops codons, between the meganuclease recognition sequences, are an optional feature. Note: “MOD2*-Kan^{R}” is referred to as “TN5MK” in FIG. 20.

[0017] FIG. 5 depicts a plot of transposon insertion location vs genome position for transposon insertions (transposon-inserted circular target DNAs) generated using the methods disclosed herein.

[0018] FIG. 6 provides a schematic representation of molecular details of steps of one embodiment of a method of generating a deletion library.

[0019] FIG. 7 provides data from contacting a population of cleaved linear target DNAs with T4 DNA polymerase (an example of a 3′ to 5′ exonuclease) to generate a population of deletion DNAs. The exonuclease digestion of the target DNAs using T4 DNA polymerase was performed in this example in the presence or absence of RecJ (a 5′ to 3′ exonuclease) and in the presence or absence of single strand binding protein (SSB).

[0020] FIG. 8 provides the same data as FIG. 7, but the image is of a longer exposure.

[0021] FIG. 9 provides a graph showing the amount of DNA removed during exonuclease digestion as a function of time.

[0022] FIG. 10 provides a schematic representation of sequencing (e.g., deep-sequencing) members of a generated deletion library in which a barcode (e.g., barcode cassette) has been inserted.

[0023] FIG. 11 provides a histogram of deletion sizes of an HIV-1 deletion library (pNL4-3Δ₁) which was generated using methods described herein. The histogram shows a diverse range of different sized deletions. Data were obtained by deep-sequencing the deletion plasmid library.

[0024] FIG. 12 provides a plot of deletion depth vs genome location for the same library referred to in FIG. 11. The plot demonstrates that the deletion library was comprehensive (coverage over the genome) and relatively unbiased. The valley surrounding ori/bla (required for plasmid maintenance in culture) shows that bacteria harboring plasmids with deletions in this region were select against.

[0025] FIG. 13 provides a schematic representation of one method to test for infectivity of a generated deletion library where the circular target DNAs include a viral genome. For example, such a method may include a step of introducing members of the library of circularized deletion DNAs into cells, e.g., mammalian cells, and assaying for viral infectivity.

[0026] FIG. 14 provides a schematic representation of deletions that can be obtained in a generated library when the target DNA includes a viral genome.

[0027] FIG. 15 provides a representation of the type of data that can be obtained using sequencing (e.g., to identify the presence of barcodes) before and after a step of assaying for viral infectivity.

[0028] FIG. 16 provides a representation of the type of data that can be obtained using sequencing (e.g., to identify the presence of barcodes) before and after a step of assaying for viral infectivity. FIG. 17 provides a schematic representation of a “high multiplicity of infection (MOI) screen” for identifying DIPs from a generated deletion library of viral genome containing target DNAs. The indicated use of MT-4 cells is provided as an example and is not limiting.

[0029] FIG. 18 presents a plot of deletion depth vs position for the NL4-3 library after 12 high-MOI passages in a T-cell line. High deletion depth indicates that deletions are tolerated in this region, low deletion depth indicates regions intolerant of deletion. This data is used to identify regions of the genome intolerant of deletion (cis-acting elements), where trans-complementation by the wildtype virus is not possible.

[0030] FIG. 19 provides a schematic representation of a “low multiplicity of infection (MOI) screen” for identifying DIPs from a generated deletion library of viral genome containing target DNAs. The indicated use of MT-4 cells and HIV protease inhibitors is provided as an example and is not limiting.

[0031] FIG. 20 provides sequences for constructs used in the examples section. Note: “TN5MK” is referred to as “MOD2*-Kan^{R}” in FIG. 3 and FIG. 4, and “TN5MC” is referred to as “MOD2*-Cm^{R}” in FIG. 3.

[0032] FIG. 21 provides a table showing details of the pNL4-3Δ₁ deletion library of the present disclosure.

[0033] FIG. 22 provides a schematic showing the RNA genome of HIV-1. The nine protein coding genes of HIV-1 are depicted as gray rectangles, with protein domains annotated underneath each rectangle and protease cleavage sites shown as vertical dashed lines. Two of the genes are bi-exonic (tat and rev) while the remainder are mono-exonic. The LTR at the genome termini are shown as unfilled rectangles. Regions of known secondary structure and potential cis-acting elements are annotated above gene start locations and include: the 5′ untranslated region, gag-pol ribosomal frameshift, central polypurine tract/central termination sequence, Env signal-peptide stem, V1, V2, V3, V4, V5 loops of gp120; the Rev Response Element; the polypurine tract; and the 3′ UTR.

[0034] FIG. 23 provides a schematic illustrating the preparation of IIlumina sequencing libraries from PCR of barcode cassettes, version 1. Three consecutive PCR reactions were used to add adapter sequences compatible with the TruSeq sequencing system. Introduction of molecular barcodes and multiplexing barcodes, allowed for high-throughput quantification of the barcoded libraries.

[0035] FIG. 24 provides a schematic of a block design of a high-MOI passage of NL43Δ₁ according to an exemplary embodiment of the present disclosure (see also, Example 6). 293T cells were co-transfected with equal masses of pNL4-3 and pNL43Δ₁ to generate a pool of infectious virus containing both wildtype virus and deletion mutants. The common virus pool was divided and used to infect MT-4 in triplicate (K,L,M). Using a combination of cell-mediated and cell-free transfers, cell-free virus was harvested after 1 week (3 passages: K0/L0/M0), 2 weeks (6 passages (K1/L1/M1)), 3 weeks (9 passages (K2/L2/M2), and 4 weeks (12 passages (K3/L3/M3).). In addition, samples of mRNA from 293T (tx: transcription) and cell-free supernatant (enc: encapsidation) were saved. At the same time, a pool of virus containing only NL4-3 (no deletion mutants) was passaged identically (Flasks A,B,C: not shown).

[0036] FIG. 25 provides flow cytometry dot plots illustrating an example titration of HIV-1 stocks in MT-4 cells according to an exemplary embodiment of the present disclosure (see also, Example 6). 2×10⁶ MT-4 cells were infected with 100 μl of serial dilutions of an HIV-1 stock, and stained for HIV-1 Gag production (p24) at 24 hours post-infection, then assessed by flow cytometry. (DF: dilution factor, dil. MOI: MOI of dilution, est.: estimated). For each dilution, the largest flow cytometry dot plots depict side scatter (SSC) vs EGFP and the gating used to establish which cells are EGFP-positive; the small upper right plot depicts live cell gating (forward scatter (SSC) v SSC); the small lower right plot shows singlet gating (forward scatter width vs forward scatter area).

[0037] FIG. 26 provides a schematic of a HIV-1 high-MOI passage screen according to an exemplary embodiment of the present disclosure (see also, Example 6). On day 0, 2×10⁶ MT-4 (blue double discs) are infected at high MOI with a pool of virus (HIV-1) containing both wildtype (red stars) and deletion mutants (blue stars). At day 1, 10⁷ additional naive MT-4 are added and the volume expanded to 12 ml. On day 2, 6×10⁷ additional naïve MT-4 were added and the volume expanded to 72 ml. On day 3, cell-free supernatant was harvested and virus purified by ultracentrifugation.

[0038] FIG. 27 provides flow cytometry dot plots showing that high MOI is maintained throughout a week of passage for an exemplary HIV-1 high-MOI passage screen (see also, Example 6). Cells that are positive for HIV-1 capsid protein are indicated in the polygonal gate and reported as percentage of the population. For each sample, the largest flow cytometry dot plots depict side scatter (SSC) vs EGFP and the gating used to establish which cells are EGFP-positive; the small upper right plot depicts live cell gating (forward scatter (SSC) v SSC); the small lower right plot shows singlet gating (forward scatter width vs forward scatter area).

[0039] FIG. 28 provides pairwise drop plots showing R² values of 0.83-0.93 at passage 3 and passage 12, respectively, for an exemplary HIV-1 high-MOI passage screen.

[0040] FIG. 29 provides graphs showing representative mutation trajectories during high-MOI passage. Some deletions were adaptive (NL43_D01 and NL43_B04), while others were neutral (mutant 909) or deleterious (mutant 924). Data points correspond to the triplicate flasks (K,L,M) at each passage. Prevalence is in reference to the total barcode cassette pool (tagged mutants).

[0041] FIG. 30 provides a histogram showing the distribution of fitness in deletion mutants that are not extinct by passage 12 for an exemplary HIV-1 high-MOI passage screen. Of the 4390 mutants that are not extinct, 1390 (30%) are increasing in prevalence through every passage. The dashed vertical line marks the neutral fitness boundary (slope of 0).

[0042] FIG. 31 provides a graph and schematic illustrating deletion depth profile of the pNL4-3Δ₁ μlasmid deletion library for an exemplary HIV-1 high-MOI passage screen. The graph shows a peak centered on the signal peptide of env and coverage of the entire HIV-1 genome.

[0043] FIG. 32 provides a graph and schematic illustrating that the 5′ LTR and UTR are required for efficient transcription as shown for an exemplary HIV-1 high-MOI passage screen. The deletion depth profile of poly(A) RNA from transfected 293T is shown. The graph shows a region of near-zero deletion depth at the 5′ end of the genome.

[0044] FIG. 33 provides a graph and schematic illustrating that the 5′ LTR and HIV-1 RRE are required for export and encapsidation as shown for an exemplary HIV-1 high-MOI passage screen. A deletion depth profile built from tagged viral deletion mutants in the supernatant of transfected 293T. Important regions are the 5′ end of the genome (5′LTR, 5′UTR, and the RRE).

[0045] FIG. 34 provides a graph and schematic showing deletion depth profile after 3 high MOI passages in MT-4 for an exemplary HIV-1 high-MOI passage screen. Important cis-acting regions are the 5′ end of the genome (5′ LTR through Gag Matrix (p17)), cPPT/CTS, RRE, and the 3′ end of the genome (PPT-3′ LTR).

[0046] FIG. 35 provides a graph and schematic showing deletion depth profile after 6 high MOI passages in MT-4 for an exemplary HIV-1 high-MOI passage screen. Important cis-acting regions are the 5′ end of the genome (5′ LTR through Gag Matrix (p17)), cPPT/CTS, RRE, and the 3′ end of the genome (PPT-3′ LTR).

[0047] FIG. 36 provides a graph and schematic showing deletion depth profile after 12 high MOI passages in MT-4 for an exemplary HIV-1 high-MOI passage screen. Important cis-acting regions are the 5′ end of the genome (5′ LTR through Gag Matrix (p17)), cPPT/CTS, RRE, and the 3′ end of the genome (PPT-3′ LTR).

[0048] FIG. 37 provides a graph and schematic model of HIV-1 cis- and trans-acting genomic elements based on an exemplary HIV-1 high-MOI passage screen. The HIV-1 genome is composed of 4 cis-acting elements, CAE1-CAE4, and 3 trans-acting elements, TAE1-TAE3.

[0049] FIG. 38 provides a schematic of a Low MOI screen for noncytopathic HIV-1 DIPs according to an exemplary embodiment of the present disclosure. On day 0, MT-4 (blue double discs) are infected at low MOI with a pool of virus (HIV-1) containing both wildtype (red stars) and deletion mutants (blue stars). This infection occurs in the presence of an HIV-1 protease inhibitor, such as Darunavir, which restricts viral replication to a single round. Cells infected with cytopathic HIV-1 (such as the wildtype helper virus) are killed between 0 and 4 days post-infection. Uninfected cells and cells infected with deletion mutants that do not cause cell death are enriched. At 4 days post-infection, the entire population of cells is infected at high MOI with wildtype helper virus (red stars), to achieve efficient trans-complementation of deletion mutants. On day 5, the virus-containing supernatant is harvested, now enriched for deletion mutants that are non-cytopathic and retain all cis-acting elements. The virus pool can be used to infect cells at low MOI and the process iterated.

[0050] FIG. 39 provides a schematic of a block assembly strategy to generate multiply deleted strains according to an exemplary embodiment of the present disclosure. New HIV-1 mutants can be created by 7-insert Gibson Assemblies (top) or 3-insert assemblies, using previously assembled ABC and EFG blocks.

[0051] FIG. 40 provides a table showing reconstructed single contiguous deletions from pNL4-3Δ₁ according to an exemplary embodiment of the present disclosure. For each deletion, the following information are provided: block name; size of deletion in bp; location of deletion in the NL4-3 provirus genome; barcode sequence in integrated barcode cassette (top to bottom: SEQ ID NOs.: 44-55); enrichment from plasmid library to passage 12 virus in replicate K, L, and M; which genes are potentially inactivated by truncation. For example: NL43_B01 represents a 1016 bp deletion in gag and pol (bases 1636-2651 of pNL4-3/NL4-3) and was enriched 17-fold in replicate K, 21-fold in replicate L, and 19-fold in replicate M after 12 rounds of passage in MT-4.

[0052] FIG. 41 provides a graph and schematic illustrating reconstitution of adaptive single contiguous adaptive deletions of HIV-1 according to an exemplary embodiment of the present disclosure. Information is displayed in four horizontal tracks, with horizontal numbering in bp. From top to bottom: HIV-clonedDeletions mapping of adaptive HIV-1 deletions to proviral genome; HIV-genes location of HIV-1 genes; HIV-CAE Putative HIV-1-acting elements in the literature; pNL4-3, passage 12, deletion depth profile of the NL4-3Δ₁ library after twelve high MOI passages.

[0053] FIG. 42 provides a graph showing that most deletion mutants are not replication-competent (sorted by genotype) according to an exemplary embodiment of the present disclosure. MT-4 cells were infected with viral inocula produced by transfection of 293T with cloned HIV-1 mutants, and evaluated for viability by PrestoBlue assay at 5 days post-infection. Each clone was assessed by two independent experiments (n=2). The shaded region represents viability (fluorescence) values within ±30% of the uninfected cell mean (naïve). The genotype of each mutant can be read off using the key and annotations in the plot. The only clones to exhibit consistent cell killing (replication) were the reconstructed wildtype (WT) and F01-only mutant (Δnef). The positive control (NL43G) exhibited expected cell-killing as well.

[0054] FIG. 43 provides a graph showing that most deletion mutants are not replication-competent (ranked by decreasing replication competence (cell killing)) according to an exemplary embodiment of the present disclosure. MT-4 cells were infected with viral inocula produced by transfection of 293T with cloned HIV-1 mutants, and evaluated for viability by PrestoBlue assay at 5 days post-infection. Each clone was assessed by two independent experiments (n=2). The shaded region represents viability (fluorescence) values within ±30% of the uninfected cell mean (naïve). The only clones to exhibit consistent cell killing (replication) were the reconstructed wildtype (WT) and F01-only mutant (Δnef). The positive control (NL43G) exhibited expected cell-killing as well.

[0055] FIG. 44 provides a graph showing that select deletion mutants interfere with wildtype HIV-1 replication (24 h, -Darunavir), ordered by genotype, according to an exemplary embodiment of the present disclosure. MT-4 cells were infected with viral inocula produced by transfection of 293T with cloned HIV-1 mutants and a replication competent, GFP-tagged virus (NL43G), then evaluated for wildtype infection (GFP fluorescent cells) 24 hours post infection (one round of replication). Each clone was assessed by two independent experiments (n=2): both points are plotted above in a single column. The shaded region represents GFP+ values within ±30% of the mean of the NL43G only control. Clones with values below this region interfere with wildtype viral replication, clones with values above enhance wildtype virus replication. Uninfected cells (naïve) have a background GFP+ value of ≈1%. The genotype of each mutant can be read off using the key and annotations in the plot. Replication-competent clones (annotated as WT and Δnef) did not interfere with wildtype replication.

[0056] FIG. 45 provides a graph showing that select deletion mutants interfere with wildtype HIV-1 replication (24 h, -Darunavir), ranked by decreasing ability to interfere with WT virus replication, according to an exemplary embodiment of the present disclosure. FIG. 45 provides the same data as FIG. 44 but ranked by increasing interference effect. MT-4 cells were infected with viral inocula produced by transfection of 293T with cloned HIV-1 mutants and a replication competent, GFP-tagged virus (NL43G), then evaluated for wildtype infection (GFP fluorescent cells) 24 hours post infection (one round of replication). Each clone was assessed by two independent experiments (n=2): both points are plotted above in a single column. The shaded region represents GFP+ values within ±30% of the mean of the NL43G only control. Clones with values below this region interfere with wildtype viral replication, clones with values above enhance wildtype virus replication. Uninfected cells (naïve) have a background GFP+ value of ≤1%. Replication-competent clones (annotated as WT and Δnef) did not interfere with wildtype replication.

[0057] FIG. 46 provides a graph showing that select deletion mutants interfere with wildtype HIV-1 replication (24 h, -Darunavir), ordered by genotype, according to an exemplary embodiment of the present disclosure. MT-4 cells were infected with viral inocula produced by transfection of 293T with cloned HIV-1 mutants and a replication competent, GFP-tagged virus (NL43G), then evaluated for wildtype infection (GFP fluorescent cells) 24 hours post infection (one round of replication). MT-4 cells were cultured in the presence of 500 nM Darunavir, an HIV-1 protease inhibitor, to restrict subsequent transmission post-infection. Each clone was assessed by two independent experiments (n=2): both points are plotted above in a single column. The shaded region represents GFP+ values within ±30% of the mean of the NL43G only control. Clones with values below this region interfere with wildtype viral replication, clones with values above enhance wildtype virus replication. Uninfected cells (naïve) have a background GFP+ value of ≤1%. The genotype of each mutant can be read off using the key and annotations in the plot. Replication-competent clones (annotated as WT and Δnef) did not interfere with wildtype replication.

[0058] FIG. 47 provides a graph showing that select deletion mutants interfere with wildtype HIV-1 replication (48 h, -Darunavir), ordered by genotype, according to an exemplary embodiment of the present disclosure. MT-4 were infected with viral inocula produced by transfection of 293T with cloned HIV-1 mutants and a replication competent, GFP-tagged virus (NL43G), then evaluated for wildtype infection (GFP fluorescent cells) 24 hours post infection (one round of replication). Each clone was assessed by two independent experiments (n=2): both points are plotted above in a single column. The shaded region represents GFP+ values within ±30% of the mean of the NL43G only control. Clones with values below this region interfere with wildtype viral replication, clones with values above enhance wildtype virus replication. Uninfected cells (naïve) have a background GFP+ value of ≤1%. The genotype of each mutant can be read off using the key and annotations in the plot. Replication-competent clones (annotated as WT and Δnef) did not interfere with wildtype replication.

[0059] FIG. 48 provides a graph showing that select deletion mutants interfere with wildtype HIV-1 replication (48 h, -Darunavir), ranked by decreasing ability to interfere with WT virus replication, according to an exemplary embodiment of the present disclosure. FIG. 48 provides the same data as FIG. 47 but ranked by increasing interference effect. MT-4 cells were infected with viral inocula produced by transfection of 293T with cloned HIV-1 mutants and a replication competent, GFP-tagged virus (NL43G), then evaluated for wildtype infection (GFP fluorescent cells) 24 hours post infection (one round of replication). Each clone was assessed by two independent experiments (n=2): both points are plotted above in a single column. The shaded region represents GFP+ values within ±30% of the mean of the NL43G only control. Clones with values below this region interfere with wildtype viral replication, clones with values above enhance wildtype virus replication. Uninfected cells (naïve) have a background GFP+ value of ≤1%. Replication-competent clones (annotated as WT and Δnef) did not interfere with wildtype replication.

[0060] FIG. 49 provides gel images indicating that deletion mutants can be mobilized by providing missing common goods in trans according to an exemplary embodiment of the present disclosure. Deletion mutant pseudovirus stocks were prepared by packaging HIV-1 mutants in 293T by co-transfection with a VSV-G envelope plasmid and pCMVRΔ8.91, which provides four HIV-1 proteins (Gag, Pol, Tat, Rev). After 5 days of recovery in the presence of 500 nM Darunavir (an HIV-1 protease inhibitor), PCR for blocks B and D was performed on DNA isolated from the transduced cells. Each pair of lanes is marked with the BTN strain number in Table 5 (e.g. 427 is BTN427, 405 is BTN405), where B corresponds to the block B amplicon and D to the block D amplicon. The wildtype (undeleted) block B amplicon is 1.9 kbp and the WT block D amplicon is 1.5 kbp. A distinct, heavy band at size less than the WT amplicon indicates that the deletion mutant had been successfully mobilized and did not kill transduced cells. Control abbreviations are WT (infected with NL43G only), mk (mock-transfection, no deletion mutant genome was added to transfection), NTC (no template control, PCR with water as template).

[0061] FIG. 50 shows Table 9, which serves as map between the data in FIGS. 43, 45, 48 and the sequence associated with each pair of 76 datapoints.

### DETAILED DESCRIPTION

[0062] As summarized above, methods and compositions for generating a deletion library, and methods and compositions for generating and identifying a defective interfering particle (DIP) are provided. Also provided are transposon cassettes, which may be utilized, for example, in the methods described herein. In addition, the present disclosure provides human immunodeficiency virus (HIV) deletion mutants, e.g., interfering, conditionally replicating, HIV deletion mutants, and related constructs identified using the screening methods described herein.

[0063] Before the present methods and compositions are described, it is to be understood that this invention is not limited to the particular methods or compositions described, as such may, of course, vary. It is also to be understood that the terminology used herein is for the purpose of describing particular embodiments only, and is not intended to be limiting, since the scope of the present invention will be limited only by the appended claims.

[0064] Where a range of values is provided, it is understood that each intervening value, to the tenth of the unit of the lower limit unless the context clearly dictates otherwise, between the upper and lower limits of that range is also specifically disclosed. Each smaller range between any stated value or intervening value in a stated range and any other stated or intervening value in that stated range is encompassed within the invention. The upper and lower limits of these smaller ranges may independently be included or excluded in the range, and each range where either, neither or both limits are included in the smaller ranges is also encompassed within the invention, subject to any specifically excluded limit in the stated range. Where the stated range includes one or both of the limits, ranges excluding either or both of those included limits are also included in the invention.

[0065] Unless defined otherwise, all technical and scientific terms used herein have the same meaning as commonly understood by one of ordinary skill in the art to which this invention belongs. Although any methods and materials similar or equivalent to those described herein can be used in the practice or testing of the present invention, some potential and preferred methods and materials are now described. All publications mentioned herein are incorporated herein by reference to disclose and describe the methods and/or materials in connection with which the publications are cited. It is understood that the present disclosure supersedes any disclosure of an incorporated publication to the extent there is a contradiction. The complete disclosure of U.S. Patent Application Publication No. 2016-0015759 is incorporated by reference herein.

[0066] As will be apparent to those of skill in the art upon reading this disclosure, each of the individual embodiments described and illustrated herein has discrete components and features which may be readily separated from or combined with the features of any of the other several embodiments without departing from the scope or spirit of the present invention. Any recited method can be carried out in the order of events recited or in any other order that is logically possible.

[0067] It must be noted that as used herein and in the appended claims, the singular forms “a”, “an”, and “the” include plural referents unless the context clearly dictates otherwise. Thus, for example, reference to “a cell” includes a plurality of such cells and reference to “the endonuclease” includes reference to one or more endonucleases and equivalents thereof, known to those skilled in the art, and so forth. It is further noted that the claims may be drafted to exclude any element, e.g., any optional element. As such, this statement is intended to serve as antecedent basis for use of such exclusive terminology as “solely,” “only” and the like in connection with the recitation of claim elements, or use of a “negative” limitation.

[0068] The publications discussed herein are provided solely for their disclosure prior to the filing date of the present application. Nothing herein is to be construed as an admission that the present invention is not entitled to antedate such publication. Further, the dates of publication provided may be different from the actual publication dates which may need to be independently confirmed.

### Methods and Compositions

[0069] Provided are methods of generating a deletion library. Generally, members of a circular target DNA population are cleaved at different positions relative to one another to generate a library of cleaved (linearized) target DNAs where members of the library are cut at different locations. One or more exonucleases are then used to ‘chew back’ the end(s) of the cut site and the ‘chewed ends’ are then ligated to reform circular DNA. This generates a deletion library. There are numerous ways to achieve each of the steps (e.g., the cleavage step at different positions for the members of the library), and there are optional steps that can be performed prior to the circularizing (e.g., ligation) step. As discussed in more detail below, more than one round of library generation can be performed, and thus the subject methods can be used the generate complex deletion libraries in which members of the library include more than one deletion.

### Generating a Library of Cleaved (Linearized) Target DNAs

[0070] Provided are methods that include generating a library of cleaved (linearized) target DNAs from a population of circular target DNAs. In some cases, the position of cleavage of the target DNA population is random. For example, a transposon cassette can be inserted at random positions into a population of target DNAs, where the transposon cassette includes a target sequence (recognition sequence) for a sequence specific DNA endonuclease. In such a case, the transposon cassette is being used as a vehicle for inserting a recognition sequence into the population of target DNAs (at random positions). A sequence specific DNA endonuclease (one that recognizes the recognition sequence) can then be used to cleave the target DNAs, thereby generating a library of cleaved (linearized) target DNAs where members of the library are cut at different locations.

[0071] The term “transposon cassette” is used herein to mean a nucleic acid molecule that includes a ‘sequence of interest’ flanked by sequences that can be used by a transposon to insert the sequence of interest into a target DNA. Thus, in some cases, the ‘sequence of interest’ is flanked by transposon compatible inverted terminal repeats (ITRs), i.e., ITRs that are recognized and utilized by a transposon. In cases where a transposon cassette is used as a vehicle for inserting one or more target sequences (for one or more sequence specific DNA endonucleases) into target DNAs, the sequence of interest can include the one or more recognition sequences.

[0072] In some cases, the sequence of interest includes a selectable marker gene, e.g., a nucleotide sequence encoding a selectable marker such as a gene encoding a protein that provides for drug resistance, e.g., antibiotic resistance. In some cases, a sequence of interest includes a first copy and a second copy of a recognition sequence for a first sequence specific DNA endonuclease (e.g., a first meganuclease). In some cases, a sequence of interest includes a selectable marker gene flanked by a first and second recognition sequence for a sequence specific DNA endonuclease (e.g., meganuclease). In some such cases, the first recognition sequence and the second recognition sequence are identical, and can be considered a first copy and a second copy of a recognition sequence. In some such cases, the first recognition sequence is different than the second recognition sequence. In some cases, the first recognition sequence and second recognition sequence (e.g., first and second copies of a recognition sequence) flank a selectable marker gene, e.g., one that encodes a drug resistance protein such as an antibiotic resistance protein. In some embodiments, a subject transposon cassette includes a first copy and a second copy of a recognition sequence for a first meganuclease; and a first copy and a second copy of a recognition sequence for a second meganuclease. In any of the above scenarios, in some cases, the first and/or second recognition sequence is a site for I-Scel (e.g., aactataacggtcctaa\hat{ }ggtagcgaa (SEQ ID NO: 1)). in some cases, the first and/or second recognition sequence is a site for I-Ceul (e.g., aactataacggtcctaa\hat{ }ggtagcgaa (SEQ ID NO: 2)). In some cases, a first recognition sequence is a site for I-Scel and a second recognition sequence is a site for I-Ceul. In some cases a first and/or second recognition sequence is a recognition sequence for a meganuclease, e.g., selected from: a LAGLIDADG meganuclease (LMNs), I-Scel, I-Ceul, I-Crel, I-Dmol, I-Chul, I-Dirl, I-Flmul, I-Flmull, I-Anil, I-ScelV, I-Csml, I-PanI, I-PanII, I-PanMI, I-Scell, I-Ppol, l-SceIII, I-LtrI, I-GpiI, I-GZeI, I-Onul, I-HjeMI, I-Msol, I-TevI, I-TevII, I-TevIII, PI-MIel, PI-Mtul, PI-Pspl, PI-Tli I, PI-Tli II, and PI-SceV.

[0073] As noted above, a subject transposon cassette includes a sequence of interest flanked by transposase compatible inverted terminal repeats (ITRs). The ITRs can be compatible with any desired transposase, e.g., a bacterial transposase such as Tn3, Tn5, Tn7, Tn9, Tn10, Tn903, Tn1681, and the like; and eukaryotic transposases such as Tc1/mariner super family transposases, piggyBac superfamily transposases, hAT superfamily transposases, Sleeping Beauty, Frog Prince, Minos, Himarl, and the like. In some cases, the transposase compatible ITRs are compatible with (i.e., can be recognized and utilized by) a Tn5 transposase. Some of the methods provided in this disclosure include a step of inserting a transposase cassette into a target DNA. Such a step includes contacting the target DNA and the transposon cassette with a transposase. In some cases this contacting occurs inside of a cell such as a bacterial cell, and in some cases this contacting occurs in vitro outside of a cell. As the transposase compatible

[0074] ITRs listed above are suitable for compositions and methods disclosed herein, so too are the transposases. As such, suitable transposases include but are not limited to bacterial transposases such as Tn3, Tn5, Tn7, Tn9, Tn10, Tn903, Tn1681, and the like; and eukaryotic transposases such as Tc1/mariner super family transposases, piggyBac superfamily transposases, hAT superfamily transposases, Sleeping Beauty, Frog Prince, Minos, Himar1, and the like. In some cases, the transposase is a Tn5 transposase.

[0075] In some embodiments, a subject method includes a step of inserting a target sequence (e.g., one or more target sequences) for a sequence specific DNA endonuclease (e.g., one or more sequence specific DNA endonucleases) into a population of circular target DNAs, thereby generating a population of sequence-inserted circular target DNAs. In some cases, the inserting step is carried out by inserting a transposon cassette that includes the target sequence (e.g., the one or more target sequences), thereby generating a population of transposon-inserted circular target DNAs. In some cases, the transposon cassette includes a single recognition sequence (e.g., in the middle or near one end of the transposon cassette) and can therefore be used to introduce a single recognition sequence into the population of target DNAs. In some cases, the transposon cassette includes more than one recognition sequences (e.g., a first and a second recognition sequence). In some such cases, the first and second recognition sequences are positioned at or near the ends of the transposon cassette (e.g., within 20 bases, 30 bases, 50 bases, 60 bases, 75 bases, or 100 bases of the end) such that cleavage of the first and second recognition sequences effectively removes the transposon cassette (or most of the transposon cassette) from the target DNA, while simultaneously generating a linearized target DNA, and therefore generating the desired library of cleaved (linearized) target DNAs where members of the library are cut at different locations.

[0076] In some cases when the transposon cassette include first and second recognition sequences, the first and second recognition sequences are the same, and are therefore first and second copies of a given recognition sequence. In some such cases, the same sequence specific DNA endonuclease (e.g., restriction enzyme, meganuclease, programmable genome editing nuclease) can then be used to cleave at both sites.

[0077] In some embodiments, the transposon cassette includes a first and a second recognition sequence where the first and second recognition sequences are not the same. In some such cases, a different sequence specific DNA endonuclease (e.g., restriction enzyme, meganuclease, programmable genome editing nuclease) is used to cleave the two sites (e.g., the library of transposon-inserted target DNAs can be contacted with two sequence specific DNA endonucleases). However, in some cases one sequence specific DNA endonuclease can still be used. For example, in some cases two different guide RNAs can be used with the same CRISPR/Cas protein. As another example, in some cases a given sequence specific DNA endonuclease can recognize both recognition sequences.

[0078] In some cases, the population of circular target DNAs (e.g., plasmids) are present inside of host cells (e.g., bacterial host cells such as E. coli) and the step of inserting a transposon cassette takes place inside of the host cell (e.g., by introducing a transposase and/or a nucleic acid encoding a transposase into the cell; by inducing expression of a transposase, e.g., where the host cell already includes a nucleic acid encoding the transposase; and the like). In some such cases, a subject method can include a selection/growth step in the host cell. For example, if the transposon cassette includes a drug resistance marker, the host cells can be grown in the presence of drug to select for those cells harboring a transposon-inserted circular target DNA.

[0079] Once a population of transposon-inserted circular target DNAs is generated (and in some cases after a selection/growth step in the host cells), they can be isolated/purified from the host cells prior to the next step (e.g., prior to contacting them with a sequence specific DNA endonuclease).

[0080] In some cases (e.g., when the circular target DNAs are small circular DNAs, e.g., less than 50 kb), a selection and growth step in bacteria can be avoided through the use of in vitro rolling circle amplification (RCA). For example, after repair of nicked target DNA post-transposition, a highly-processive and strand-displacing polymerase (e.g., phi29 DNA polymerase), along with primers specific to the inserted transposon cassette, can be used to selectively amplify insertion mutants from the pool of circular plasmids. In other words, such a step can circumvent amplifying DNA through bacterial transformation. Use of RCA can decrease the time required for growth/selection of bacteria and can avoid biasing the library towards clones that do not impede bacterial growth.

[0081] Non-Random Cleavage

[0082] As noted above, in some cases the position of cleavage of the target DNA population is random, however in some cases the position of cleavage is not random. For example, a population of target DNAs can be distributed (e.g., aliquoted) into different vessels (e.g., different tubes, different wells of a multi-well plate etc.). If a sequence of interest is known (e.g., a viral genome sequence), that is present in the population of target DNAs, then target DNAs in vessels (e.g., wells of the multi-well plate) can be cleaved at different pre-determined locations by using a programmable sequence specific endonuclease. For example, if a CRISPR/Cas endonuclease (e.g., Cas9, Cpf1, and the like) is used, guide RNAs can readily be designed to target any desired sequence within the target population (e.g., while taking protospacer adjacent motif (PAM) sequence requirements into account in some cases). For example, guide RNAs can be tiled at any desired spacing (e.g., every 5 nucleotides (nt), every 10 nt, every 20 nt, every 50nt—overlapping, non-overlapping, and the like) along a sequence of interest, and the target DNAs in each vessel (e.g., each well) can be contacted with one of the guide RNAs in addition to the CRISPR/Cas endonuclease. In this way, a library of cleaved target DNAs can be generated where members of the library are separated from one another because they are in separate vessels. As would be understood by one of ordinary skill in the art, in some cases, one would take PAM sequences into account when designing guide RNAs, and therefore the spacing between guide RNA target sites can be a function of PAM sequence constraints, and consistent spacing across a given target sequence would not necessarily be possible in some cases. However, different CRISPR/Cas endonucleases (e.g., even the same protein, such as Cas9, isolated from different species) can have different PAM requirements, and thus, the use of more than one CRISPR/Cas endonuclease can in some cases relieve at least some of the constraints imposed by PAM requirements on available target sites.

[0083] The remaining steps can then be carried out separately (e.g., in separate vessels, in separate wells of a multi-well plate), or at any step, members can be pooled and treated together in one vessel. As an illustrative but non-limiting example, one could use 96 different guide RNAs (or 384 different guide RNAs) to cleave target DNAs in 96 different wells of a 96-well plate (or 384 different wells of a 384 well plate), to generate 96 members (or 384 members) of a library where each member is cleaved at a different site (and in this case the sites are designed by the user prior to starting the method). The exonuclease step (chew back) can then be performed in separate wells (e.g., by aliquoting exonuclease to each well), or wells can be pooled prior to adding exonuclease to the pool.

[0084] Circular Target DNAs

[0085] A circular target DNA of a population of circular target DNAs can be any circular target DNA. In some cases, the circular target DNAs are plasmid DNAs, e.g., in some cases, the circular target DNAs include an origin of replication (ORI). In some cases, the circular target DNAs include a drug resistance marker (e.g., a nucleotide sequence encoding a protein that provides for drug resistance). In some embodiments, a population of circular target DNAs are generated from a population of linear DNA molecules (e.g., via intramolecular ligation). For example, a subject method can include a step of circularizing a population of linear DNA molecules (e.g., a population of PCR products, a population of linear viral genomes, a population of products from a restriction digest, etc.) to generate a population of circular target DNAs. In some cases, members of such a population are identical (e.g., many copies of a PCR product or restriction digest can be used to generate a population of circular DNAs, where each circular DNA is identical). In some cases, members of such a population can be different from one another (e.g., two or more different PCR products or restriction digest products can be circularized).

[0086] In some embodiments, the members of a population of circular target DNAs are identical (are copies of one another). In some embodiments, the members of a population of circular target DNAs are not identical (e.g., in some cases the population of circular target DNAs can itself be a deletion library). For example, the population of circular target DNAs can be a library of known deletion mutants (e.g., known viral deletion mutants). As another example, if two rounds of a subject method are performed, the starting population of target DNAs for the second round can be a deletion library (e.g., generated during a first round of deletion) where members of the library include deletions of different sections of DNA relative to other members of the library. Such a library can serve as a population of circular target DNAs, e.g., a transposon cassette can still be introduced into the population. Performing a second round of deletion in this manner can therefore generate constructs with deletions at multiple different entry points. As an illustrative example, for a target DNA of 20 kb (kilobases) in length, the first round of deletion might have deleted bases 2000 through 2650 for a one member (of the library that was generated), of which multiple copies would likely be present. A second round of deletion might generate two new members, both of which are generated from copies of the same deletion member. Thus, for example, one new member might be generated with bases 3500 through 3650 deleted (in addition to bases 2000 through 2650), while a second new member might be generated with bases 1500 through 1580 deleted (in addition to bases 2000 through 2650). Thus, multiple rounds of deletion (e.g., 2, 3, 4, 5, etc.) can produce complex deletion libraries. In some cases, more than one round of library generation is performed where the second round includes the insertion of a transposon cassette, e.g., as described above.

[0087] For example, in some cases, a first round of deletion is performed using a CRISPR/Cas endonuclease to generate the cleaved linear target DNAs by targeting the CRISPR/Cas endonuclease to pre-selected sites within the population of circular target DNAs (e.g., by designing guide RNAs, e.g., at pre-selected spacing, to target a known sequence of interest such as a viral genome). After exonuclease treatment and circularization to generate a first library of circularized deletion DNAs, the library of circularized deletion DNAs is used as input (a population of circular target DNAs) for a second round of deletion. Thus, one or more target sequences for one or more sequence specific DNA endonucleases (e.g., one or more meganucleases) is inserted (e.g., at random positions via a transposon cassette) into the library of circularized deletion DNAs to generate a population of transposon-inserted circular target DNAs, and the method is continued. In some such cases, the first round of deletion might only target a small number of locations of interest for deletion (one location, e.g., using only one guide RNA that targets a particular location; or a small number of locations, e.g., using a small number of guide RNAs to target a small number of locations), while the second round is used to generate deletion constructs that include the first deletion plus a second deletion.

[0088] Viral Genome

[0089] In some cases, the circular target DNAs include a viral genome (e.g., a whole viral genome, a viral genome that includes a deletion, a partial viral genome, etc.). Thus, in some cases the subject methods are used to generate a library of viral deletion mutants. In some such cases, a library of generated viral deletion mutants can be considered a library of potential defective interfering particles (DIPs). DIPs are mutant versions of viruses that include genomic deletions such that they are unable to replicate except when complemented by wild-type virus replicating within the same cell. DIPs can arise naturally because viral genomes encode both cis- and trans-acting elements. Trans-acting elements (trans-elements) code for gene products, such as capsid proteins or transcription factors, and cis-acting elements (cis-elements) are regions of the viral genome that interact with trans-element products to achieve productive viral replication including viral genome amplification, encapsidation, and viral egress. In other words, the viral genome of a DIP can still be copied and packaged into viral particles if the missing (deleted) trans-elements are provided in trans (e.g., by a co-infecting virus). In some cases, a DIP can be used therapeutically to reduce viral infectivity of a co-infecting virus, e.g., by competing for and therefore diluting out the available trans-elements. In some cases, a DIP can be used as a therapeutic (e.g., as a treatment for viral disease), and in some cases a DIP is therefore referred to as a therapeutic interfering particle (TIP). While DIPs can arise naturally, methods of this disclosure can be used to generate DIPs, e.g., by generating a deletion library of viral genomes. DIPs can then be identified from such a deletion library by sequencing the library members to identify those predicted to be DIPs. Alternatively, or in addition, a generated deletion library can be screened, e.g., by introducing the library into cells, to identify those members with viral genomes having the desired function. Additional description of DIPs and TIPs and uses thereof is provided in U.S. Patent Application Publication No. 20160015759, the disclosure of which is incorporated by reference herein in its entirety.

[0090] Thus, in some cases a subject method includes introducing members of the library of generated deletion constructs (e.g., deletion-containing viral genomes) into a target cell (e.g., a eukaryotic cell, such as a mammalian cell, such as a human cell) and assaying for infectivity. In some such cases, the assaying step also includes complementation of the library members with a co-infecting virus.

[0091] Such introducing is meant herein to encompass any form of introduction of nucleic acids into cells (e.g., electroporation, transfection, lipofection, nanoparticle delivery, viral delivery, and the like). For example, such ‘introduction’ encompasses infecting mammalian cells in culture (e.g., with members of a generated library of circularized deletion viral DNAs, i.e., with viral particles that contain viral genomes encoded by the members of the generated library of circularized deletion viral DNAs). In some cases, as described in more detail below, a method includes generating from the generated library of circularized deletion DNAs, at least one of: linear double stranded DNA (dsDNA) products, linear single stranded DNA (ssDNA) products, linear single stranded RNA (ssRNA) products, and linear double stranded RNA (dsRNA) products. Thus in some such cases, a subject method includes introducing said linear dsDNA products, linear ssDNA products, linear ssRNA products, and/or linear dsRNA products into mammalian cells (e.g., via any convenient method for introducing nucleic acids into cells, including but not limited to electroporation, transfection, lipofection, nanoparticle delivery, viral delivery, and the like). Such methods can also include assaying for viral infectivity.

[0092] Assaying for viral infectivity can be performed using any convenient method and many various methods will be known to one of ordinary skill in the art. Assaying for viral infectivity can be performed on the cells into which the members of the library of circularized deletion DNAs (and/or at least one of: linear double stranded DNA (dsDNA) products, linear single stranded

[0093] DNA (ssDNA) products, linear single stranded RNA (ssRNA) products, and linear double stranded RNA (dsRNA) products generated from the library of circularized deletion DNAs) are introduced. For example, in some cases the members and/or products are introduced via virus.ln some cases, members of the library of circularized deletion DNAs (and/or at least one of: linear dsDNA products, linear ssDNA products, linear ssRNA products, and linear dsRNA products generated from the library of circularized deletion DNAs) are introduced into a first population of cells (e.g., mammalian cells) in order to generate viral particles, and the viral particles are then used to contact a second population of cells (e.g., mammalian cells). Thus, as used herein, unless otherwise explicitly described, the phrase “assaying for viral infectivity” encompasses both of the above scenarios (e.g., encompasses assaying for infectivity in the cells into which the members and/or products were introduced, and also encompasses assaying the second population of cells as described above).

[0094] In some embodiments a subject method (e.g., a method of generating and identifying a DIP) includes, after generating a deletion library (e.g., a library of circularized deletion viral DNAs), a high multiplicity of infection (MOI) screen (e.g., utilizing an MOI of ≥2). As used herein, a “high MOI” is an MOI of 2 or more (e.g., 2.5 or more, 3 or more, 5 or more, etc.). In some cases, a subject method uses a high MOI. Thus, in some cases, a subject method uses an MOI (a high MOI) of 2 or more, 3 or more, or 5 or more. In some cases, a subject method uses an MOI (a high MOI) in a range of from 2-150 (e.g., from 2-100, 2-80, 2-50, 2-30, 3-150, 3-100, 3-80, 3-50, 3-30, 5-150, 5-100, 5-80, 5-50, or 5-30). In some cases, a subject method uses an MOI (a high MOI) in a range of from 3-100 (e.g., 5-100). At high MOI, many (if not all) cells are infected by more than one virus, which allows for complementation of defective viruses by wildtype counterparts. Repeated passaging of deletion mutant libraries at high-MOI can select for mutants that can be mobilized effectively by a wild type virus (e.g., HIV-1) (e.g., FIG. 17). For example, in some cases the method includes infecting mammalian cells in culture with members of the library of circularized deletion viral DNAs at a high multiplicity of infection (MOI), culturing the infected cells for a period of time ranging from 12 hours to 2 days (e.g., from 12 hours to 36 hours or 12 hours to 24 hours), adding naive cells to the to the culture, and harvesting virus from the cells in culture. However, this screening step can in some cases select for DIPs/TIPs which can be mobilized effectively by the wildtype virus, but are cytopathic in the absence of the wildtype coinfection.

[0095] Thus, in some embodiments a subject method (e.g., a method of generating and identifying a DIP) includes a more stringent screen (referred to herein as a “low multiplicity of infection (MOI) screen”). As used herein, a “low MOI” is an MOI of less than 1 (e.g., less than 0.8, less than 0.6, etc.). In some cases, a subject method uses a low MOI. Thus, in some cases, a subject method uses an MOI (a low MOI) of less than 1 (e.g., less than 0.8, less than 0.6). In some cases, a subject method uses an MOI (a low MOI) in a range of from 0.001-0.8 (e.g., from 0.001-0.6, 0.001-0.5, 0.005-0.8, 0.005-0.6, 0.01-0.8, or 0.01-0.5). In some cases, a subject method uses an MOI (a low MOI) in a range of from 0.01-0.5. For example, a low-MOI infection of target cells with a deletion library (e.g., utilizing an MOI of <1) can be alternated with a high-MOI infection of the transduced population with wildtype virus (e.g., HIV-1) to mobilize

[0096] DIPs to naive cells (e.g., see FIG. 19). In between successive infections, the cells can be propagated in the presence of a drug to prevent further rounds of replication (e.g., using a protease inhibitor such as Darunavir for HIV-1). During the recovery period, cells infected with wild type virus (e.g., HIV-1 infected cells) will be killed, but cells transduced by well-behaving mutants (which do not produce cell-killing trans-factors) will be maintained. In this fashion, mutants that do not kill their transduced host-cell but can mobilized during wildtype virus coinfection can be selected. Thus, in some cases a subject method includes infecting mammalian cells in culture with members of the library of circularized deletion viral DNAs at a low multiplicity of infection (MOI), culturing the infected cells in the presence of an inhibitor of viral replication for a period of time ranging from 1 day to 6 days (e.g., from 1 day to 5 days, from 1 day to 4 days, from 1 day to 3 days, or from 1 day to 2 days), infecting the cultured cells with functional virus at a high MOI, culturing the infected cells for a period of time ranging from 12 hours to 4 days (e.g., 12 hours to 72 hours, 12 hours to 48 hours, or 12 hours to 24 hours), and harvesting virus from the cultured cells.

[0097] In some embodiments, a subject method includes (a) inserting a target sequence for a sequence specific DNA endonuclease into a population of circular target viral DNAs, each comprising a viral genome, to generate a population of sequence-inserted viral DNAs; (b) contacting the population of sequence-inserted viral DNAs with the sequence specific DNA endonuclease to generate a population of cleaved linear viral DNAs; (c) contacting the population of cleaved linear viral DNAs with an exonuclease to generate a population of deletion DNAs; (d) circularizing (e.g., via ligation) the deletion DNAs to generate a library of circularized deletion viral DNAs; and (e) sequencing members of the library of circularized deletion viral DNAs to identify deletion interfering particles (DIPs). In some cases, the method includes inserting a barcode sequence prior to or simultaneous with step (d).

[0098] In some cases the inserting of step (a) includes inserting a transposon cassette into the population of circular target viral DNAs, wherein the transposon cassette includes the target sequence for the sequence specific DNA endonuclease, and where the generated population of sequence-inserted viral DNAs is a population of transposon-inserted viral DNAs. In some cases (e.g., in some cases when using a CRISPR/Cas endonuclease—as discussed above), a subject method does not include step (a), and the first step of the method is instead cleaving members of the library in different locations relative to one another, which step can be followed by the exonuclease step.

[0099] Target Sequence and Sequence Specific DNA Endonucleases

[0100] In some cases a target sequence for a sequence specific DNA endonuclease is inserted into a target DNA, e.g., population of target DNAs, e.g., in some cases via insertion of a transposon cassette. The ‘target sequence’ is also referred to herein as a “recognition sequence” or “recognition site”. The term “sequence specific endonuclease” is used herein to refer to a DNA endonuclease that binds to and/or ‘recognizes’ the ‘target sequence’ in a target DNA, and cleaves the DNA. In other words, a sequence specific DNA endonuclease recognizes a specific sequence (a recognition sequence) within a target DNA molecule and cleaves the molecule based on that recognition. In some cases the sequence specific DNA endonuclease cleaves the target DNA within the recognition sequence and in some cases it cleaves outside of the recognition sequence (e.g., in the case of type IIS restriction endonucleases).

[0101] The term sequence specific DNA endonuclease encompasses, e.g., restriction enzymes, meganucleases, and programmable genome editing nucleases. Thus, examples of sequence specific endonucleases include but are not limited to: restriction endonucleases such as EcoRl, EcoRV, BamHI, etc.; meganucleases such as LAGLIDADG meganucleases (LMNs), I-Scel, I-Ceul, I-Crel, I-Dmol,I-Chul, I-Dirl, I-Flmul, I-Flmull, I-Anil, I-ScelV, I-Csml, I-Panl, I-PanII, I-PanMI, I-Scell, I-Ppol, I-SceIII, I-LtrI, I-GpiI, I-GZeI, I-Onul, I-HjeMI, I-Msol, I-Tevl, I-TevII, I-TevIII, PI-MIel, PI-Mtul, PI-Pspl, PI-Tli I, PI-Tli II, PI-SceV, and the like; and programmable gene editing endonucleases such as Zinc Finger Nucleases (ZFNs), transcription activator like effector nuclease (TALENs), and CRISPR/Cas endonucleases. In some cases, the sequence specific endonuclease of a subject composition and/or method is selected from: a meganuclease and a programmable gene editing endonuclease. In some cases, the sequence specific endonuclease of a subject composition and/or method is selected from: a meganuclease, a ZFN, a TALEN, and a CRISPR/Cas endonuclease (e.g., Cas9, Cpf1, and the like).

[0102] In some cases, the sequence specific endonuclease of a subject composition and/or method is a meganuclease. In some cases the meganuclease is selected from: LAGLIDADG meganucleases (LMNs), I-Scel, I-Ceul, I-Crel, I-Dmol, I-Chul, I-Dirt, I-FImul, I-FImull, I-Anil, I-ScelV, I-Csml, I-PanI, I-PanII, I-PanMI, I-Scell, I-Ppol, I-SceIII, I-LtrI, I-GpiI, I-GZeI, I-Onul, I-HjeMI, I-Msol, I-TevI, I-TevII, I-TevIII, PI-MIel, PI-Mtul, PI-Pspl, PI-Tli I, PI-Tli II, and PI-SceV. In some cases, the meganuclease I-Scel is used. In some cases, the meganuclease I-Ceul is used. In some cases, the meganucleases I-Scel and I-Ceul are used.

[0103] In some cases the sequence specific DNA endonuclease is a programmable genome editing nuclease. The term “programmable genome editing nuclease” is used herein to refer to endonucleases that can be targeted to different target sites (recognition sequences) within a target DNA. Examples of suitable programmable genome editing nucleases include but are not limited to zinc finger nucleases (ZFNs), TAL-effector DNA binding domain-nuclease fusion proteins (transcription activator-like effector nucleases (TALENs)), and CRISPR/Cas endonucleases (e.g., class 2 CRISPR/Cas endonucleases such as a type II, type V, or type VI CRISPR/Cas endonucleases). Thus, in some embodiments, a programmable genome editing nuclease is selected from: a ZFN, a TALEN, and a CRISPR/Cas endonuclease (e.g., a class 2 CRISPR/Cas endonuclease such as a type II, type V, or type VI CRISPR/Cas endonuclease). In some cases, the sequence specific endonuclease of a subject composition and/or method is a CRISPR/Cas endonuclease (e.g., Cas9, Cpf1, and the like). In some cases, the sequence specific endonuclease of a subject composition and/or method is selected from: a meganuclease, a ZFN, and a TALEN.

[0104] Information related to class 2 type II CRISPR/Cas endonuclease Cas9 proteins and Cas9 guide RNAs (as well as methods of their delivery) (as well as information regarding requirements related to protospacer adjacent motif (PAM) sequences present in targeted nucleic acids) can be found in the art, for example, see Jinek et al., Science. 2012 Aug. 17; 337(6096):816-21; Chylinski et al., RNA Biol. 2013 May; 10(5):726-37; Ma et al., Biomed Res Int. 2013; 2013:270805; Hou et al., Proc Natl Acad Sci U S A. 2013 Sep. 24; 110(39):15644-9; Jinek et al., Elife. 2013; 2:e00471; Pattanayak et al., Nat Biotechnol. 2013 Sep.; 31(9):839-43; Qi et al, Cell. 2013 Feb. 28; 152(5):1173-83; Wang et al., Cell. 2013 May 9; 153(4):910-8; Auer et. al., Genome Res. 2013 Oct. 31; Chen et. al., Nucleic Acids Res. 2013 Nov. 1; 41(20):e19; Cheng et. al., Cell Res. 2013 Oct.; 23(10):1163-71; Cho et. al., Genetics. 2013 Nov; 195(3):1177-80; DiCarlo et al., Nucleic Acids Res. 2013 April; 41(7):4336-43; Dickinson et. al., Nat Methods. 2013 Oct; 10(10):1028-34; Ebina et. al., Sci Rep. 2013; 3:2510; Fujii et. al, Nucleic Acids Res. 2013 Nov. 1; 41(20):e187; Hu et. al., Cell Res. 2013 Nov.; 23(11):1322-5; Jiang et. al., Nucleic Acids Res. 2013 Nov. 1; 41(20):e188; Larson et. al., Nat Protoc. 2013 Nov.; 8(11):2180-96; Mali et. at., Nat Methods. 2013 Oct.; 10(10):957-63; Nakayama et. al., Genesis. 2013 December; 51(12):835-43; Ran et. al., Nat Protoc. 2013 November; 8(11):2281-308; Ran et. al., Cell. 2013 Sep. 12; 154(6):1380-9; Upadhyay et. al., G3 (Bethesda). 2013 Dec. 9; 3(12):2233-8; Walsh et. al., Proc Natl Acad Sci U S A. 2013 Sep. 24; 110(39):15514-5; Xie et. al., Mol Plant. 2013 Oct. 9; Yang et. al., Cell. 2013 Sep. 12; 154(6):1370-9; Briner et al., Mol Cell. 2014 Oct. 23; 56(2):333-9; and U.S. patents and patent applications: 8,906,616; 8,895,308; 8,889,418; 8,889,356; 8,871,445; 8,865,406; 8,795,965; 8,771,945; 8,697,359; 20140068797; 20140170753; 20140179006; 20140179770; 20140186843; 20140186919; 20140186958; 20140189896; 20140227787; 20140234972; 20140242664; 20140242699; 20140242700; 20140242702; 20140248702; 20140256046;

[0105] 20140273037; 20140273226; 20140273230; 20140273231; 20140273232; 20140273233; 20140273234; 20140273235; 20140287938; 20140295556; 20140295557; 20140298547; 20140304853; 20140309487; 20140310828; 20140310830; 20140315985; 20140335063; 20140335620; 20140342456; 20140342457; 20140342458; 20140349400; 20140349405; 20140356867; 20140356956; 20140356958; 20140356959; 20140357523; 20140357530; 20140364333; and 20140377868; all of which are hereby incorporated by reference in their entirety. Examples and guidance related to type V CRISPR/Cas endonucleases (e.g., Cpf1) or type VI CRISPR/Cas endonucleases and guide RNAs (as well as information regarding requirements related to protospacer adjacent motif (PAM) sequences present in targeted nucleic acids) can be found in the art, for example, see Zetsche et al, Cell. 2015 Oct. 22; 163(3):759-71; Makarova et al, Nat Rev Microbiol. 2015 Nov.; 13(11):722-36; and Shmakov et al., Mol Cell. 2015 Nov. 5; 60(3):385-97.

[0106] Useful designer zinc finger modules include those that recognize various GNN and ANN triplets (Dreier, et al., (2001) J Biol Chem 276:29466-78; Dreier, et al., (2000) J Mol Biol 303:489-502; Liu, et al., (2002) J Biol Chem 277:3850-6), as well as those that recognize various CNN or TNN triplets (Dreier, et al., (2005) J Biol Chem 280:35588-97; Jamieson, et al., (2003) Nature Rev Drug Discov 2:361-8). See also, Durai, et al., (2005) Nucleic Acids Res 33:5978-90; Segal, (2002) Methods 26:76-83; Porteus and Carroll, (2005) Nat Biotechnol 23:967-73; Pabo, et al., (2001) Ann Rev Biochem 70:313-40; Wolfe, et al., (2000) Ann Rev Biophys Biomol Struct 29:183-212; Segal and Barbas, (2001) Curr Opin Biotechnol 12:632-7; Segal, et al., (2003) Biochemistry 42:2137-48; Beerli and Barbas, (2002) Nat Biotechnol 20:135-41; Carroll, et al., (2006) Nature Protocols 1:1329; Ordiz, et al., (2002) Proc Natl Acad Sci USA 99:13290-5; Guan, et al., (2002) Proc Natl Acad Sci USA 99:13296-301.

[0107] For more information on ZFNs and TALENs (as well as methods of their delivery), refer to Sanjana et al., Nat Protoc. 2012 Jan. 5; 7(1):171-92 as well as international patent applications WO2002099084; WO00/42219; WO02/42459; WO2003062455; WO03/080809; WO05/014791; WO05/084190; WO08/021207; WO09/042186; WO09/054985; WO10/079430; and WO10/065123; U.S. Pat. Nos. 8,685,737; 6,140,466; 6,511,808; and 6,453,242; and US Patent Application Nos. 2011/0145940, 2003/0059767, and 2003/0108880; all of which are hereby incorporated by reference in their entirety.

[0108] In some cases (e.g., in the case of restriction enzymes), the recognition sequence is a constant (does not change) for the given protein (e.g., the recognition sequence for the BamHl restriction enzyme is G\hat{ }GATCC). In some cases, the sequence specific DNA endonuclease is ‘programmable’ in the sense that the protein (or its associated RNA in the case of CRISPR/Cas endonucleases) can be modified/engineered to recognize a desired recognition sequence. In some cases (e.g., in cases where the sequence specific DNA endonuclease is a meganuclease and/or in cases where the sequence specific DNA endonuclease is a CRISPR/Cas endonuclease), the recognition sequence has a length of 14 or more nucleotides (nt) (e.g., 15 or more, 16 or more, 17 or more, 18 or more, 19 or more, or 20 or more nt). In some cases the recognition sequence has a length in a range of from 14-40 nt (e.g., 14-35, 14-30, 14-25, 15-40, 15-35, 15-30, 15-25, 16-40, 16-35, 16-30, 16-25, 17-40, 17-35, 17-30, or 17-25 nt). In some cases the recognition sequence has a length of 14 or more base pairs (bp) (e.g., 15 or more, 16 or more, 17 or more, 18 or more, 19 or more, or 20 or more bp). In some cases the recognition sequence has a length in a range of from 14-40 bp (e.g., 14-35, 14-30, 14-25, 15-40, 15-35, 15-30, 15-25, 16-40, 16-35, 16-30, 16-25, 17-40, 17-35, 17-30, or 17-25 bp).

[0109] When referring above to the lengths of a recognition sequence, it would be readily understood to one of ordinary skill in the art that some proteins recognize the double-stranded helix and the recognition sequence can therefore be thought of in terms of base pairs (bp), while in some cases (e.g., in the case of CRISPR/Cas endonucleases) the recognition sequence is recognized in single stranded form (e.g., a guide RNA of a CRISPR/Cas endonuclease can hybridize to the target DNA) and the recognition sequence can therefore be thought of in terms of nucleotides (nt). However, when using ‘bp’ or ‘nt’ herein when referring to a recognition sequence, this terminology is not intended to be limiting. As an example, if a particular method or composition described herein encompasses both types of sequence specific DNA endonuclease (those that recognize ‘bp’ and those that recognize ‘nt’), either of the terms ‘nt’ or ‘bp’ can be used without limiting the scope of the sequence specific DNA endonuclease, because one of ordinary skill in the art would readily understand which term (‘nt’ or ‘bp’) would appropriately apply, and would understand that this depends on which protein is chosen. In the case of a length limitation of the recognition sequence, one of ordinary skill in the art would understand that the length limitation being discussed equally applies regardless of whether the term ‘nt’ or ‘bp’ is used.

### Chew Back (Exonuclease Digestion)

[0110] After the circular target DNAs are cleaved, generating a population of cleaved linear target DNAs, the open ends of the linear target DNAs are digested (chewed back) by exonucleases. Many different exonucleases will be known to one of ordinary skill in the art and any convenient exonuclease can be used. In some cases, a 5′ to 3′ exonuclease is used. In some cases, a 3′ to 5′ exonuclease is used. In some cases, an exonuclease is used that has both 5′ to 3′ and 3′ to 5′ exonuclease activity. In some cases, more than one exonuclease is used (e.g., 2 exonucleases). In some cases, the population of cleaved linear target DNAs is contacted with a 5′ to 3′ exonuclease and a 3′ to 5′ exonuclease (e.g., simultaneously or one before the other).

[0111] In some cases, a T4 DNA polymerase is used as a 3′ to 5′ exonuclease (in the absence of dNTPs, T4 DNA polymerase has 3′ to 5′ exonuclease activity). In some cases, RecJ is used as a 5′ to 3′ exonuclease. In some cases T4 DNA polymerase (in the absence of dNTPs) and RecJ are used. Examples of exonucleases include but are not limited to: DNA polymerase (e.g., T4 DNA polymerase) (in the absence of dNTPS), lambda exonuclease (5′->3′), T5 exonuclease (5′->3′), exonuclease III (3′->5′), exonuclease V (5′->3′ and 3′->5′), T7 exonuclease (5′->3′), exonuclease T, exonuclease VII (truncated)(5′->3′), and RecJ exonuclease (5′->3′).

[0112] The rate of DNA digestion (chew back) is sensitive to temperature, thus the size of the desired deletion can be controlled by regulating the temperature during exonuclease digestion. For example, in the examples section below when using T4 DNA polymerase (in the absence of dNTPs) and RecJ as the exonucleases, the double-end digestion rate (chewback rate) proceeded at a rate of 50 bp/min at 37° C. and at a reduced rate at lower temperatures (e.g., as discussed in the examples section below). Thus, temperature can be decreased or increased and/or digestion time can be decreased or increased to control the size of deletion (i.e., the amount of exonuclease digestion). For example, in some cases, the temperature and time are adjusted so that exonuclease digestion causes a deletion in a desired size range. As an illustrative example, if a deletion in a range of from 500-1000 base pairs (bp) is desired, the time and temperature of digestion can be adjusted so that 250-500 nucleotides are removed from each end of the linearized (cut) target DNA, i.e., the size of the deletion is the sum of the number of nucleotides removed from each end of the linearized target DNA. In some cases, the temperature and time are adjusted so that exonuclease digestion causes a deletion having a size in a range of from 20-1000 bp (e.g., from 20-50, 40-80, 20-100, 40-100, 20-200, 40-200, 60-100, 60-200, 80-150, 80-250, 100-250, 150-350, 100-500, 200-500, 200-700, 300-800, 400-800, 500-1000, 700-1000, 20-800, 50-1000, 100-1000, 250-1000, 50-1000, 50-750, 100-1000, or 100-750 bp).

[0113] In some cases, contacting with an exonuclease (one or more exonucleases) is performed at a temperature in a range of from room temperature (e.g., 25° C.) to 40° C. (e.g., from 25-37° C., 30-37° C., 32-40° C., or 30-40° C.). In some cases contacting with an exonuclease is performed at 37° C. In some cases contacting with an exonuclease is performed at 32° C. In some cases contacting with an exonuclease is performed at 30° C. In some cases contacting with an exonuclease is performed at 25° C. In some cases contacting with an exonuclease is performed at room temperature.

[0114] In some cases, the target DNA is contacted with an exonuclease (one or more exonucleases) for a period of time in a range of from 10 seconds to 40 minutes (e.g., from 10 seconds to 30 minutes, 10 seconds to 20 minutes, 10 seconds to 15 minutes, 10 seconds to 10 minutes, 30 seconds to 30 minutes, 30 seconds to 20 minutes, 30 seconds to 15 minutes, 30 seconds to 12 minutes, 30 seconds to 10 minutes, 1 to 40 minutes, 1 to 30 minutes, 1 to 20 minutes, 1 to 15 minutes, 1 to 10 minutes, 3 to 40 minutes, 3 to 30 minutes, 3 to 20 minutes, 3 to 15 minutes, 3 to 12 minutes, or 3 to 10 minutes). In some cases the contacting is for a period of time in a range of from 20 seconds to 15 minutes.

[0115] After DNA digestion (chew back), the remaining overhanging DNA ends can be repaired (e.g., using T4 DNA Polymerase plus dNTPs) or in some cases the single stranded overhangs can be removed (e.g., using a nuclease such as mung bean nuclease that cleaves single stranded DNA but not double stranded DNA). For example, if only a 5′ to 3′ or 3′ to 5′ exonuclease is used, a nuclease specific for single stranded DNA (i.e., that does not cut double stranded DNA) (e.g., mung bean nuclease) can be used to remove the overhang.

[0116] The step of contacting with one or more exonucleases (i.e., chew back) can be carried out in the presence or absence of a single strand binding protein (SSB protein). An SSB is a protein that binds to exposed single stranded DNA ends, which can achieve numerous results, including but not limited to: (i) helping stabilize the DNA by preventing nucleases from accessing the DNA, and (ii) preventing hairpin formation within the single stranded DNA. Examples of SSB proteins include but are not limited to: a eukaryotic SSB protein (e.g., replication protein A (RPA)); bacterial SSB protein; and viral SSB proteins. In some cases, the step of contacting with one or more exonucleases is performed in the presence of an SSB. In some cases, the step of contacting with one or more exonucleases is performed in the absence of an SSB.

### Barcode

[0117] In some embodiments, the members of a library are ‘tagged’ by adding a barcode to the target DNAs after exonuclease digestion (and after remaining overhanging DNA ends are repaired/removed). The addition of a barcode can be performed prior to or simultaneously with re-circularizing (ligation). As used herein, term “barcode” is used to mean a stretch of nucleotides having a sequence that uniquely tags members of the library for future identification. For example, in some cases, a barcode cassette (from a pool of random barcode cassettes) can be added and the library sequenced so that it is known which barcode sequence is associated with which particular member, i.e., with which particular deletion (e.g., a lookup table can be created such that each member of a deletion library has a unique barcode). In this way, members of a deletion library can be tracked and accounted for by virtue of presence of the barcode (instead of having to identify the members by determining the location of deletion). As can be readily appreciated, identifying the presence of a short stretch of nucleotides using any convenient assay is much more easily accomplished than attempted to isolate and sequence individual members (in order to determine location of deletion) each time the library is used for a given experiment. For example, one can readily determine which library members are present before an experiment (e.g., before introducing library members into cells to assay for viral infectivity), and compare this to which members are present after the experiment by simply assaying for the presence of the barcode before and after, e.g., using high throughput sequencing, a microarray, PCR, qPCR, or any other method that can detect the presence/absence of a barcode sequence.

[0118] In some cases, a barcode is added as a cassette. A barcode cassette is a stretch of nucleotides that have at least one constant region (a region shared by all members receiving the cassette) and a barcode region (i.e., a barcode sequence—a region unique to the members that receive the barcode such that the barcode uniquely marks the members of the library). For example, a barcode cassette can include (i) a constant region that is a primer site, which site is in common among the barcode cassettes used, and (ii) a barcode sequence that is a unique tag, e.g., can be a stretch of random sequence. In some cases, a barcode cassette includes a barcode region flanked by two constant regions (e.g., two different primer sites). As an illustrative example, in some cases a barcode cassette is a 60 bp cassette that includes a 20 bp random barcode flanked by 20 bp primer binding sites (e.g., see FIG. 6).

[0119] A barcode sequence can have any convenient length, and is preferably long enough so that it uniquely marks the members of a given library of interest. In some cases, the barcode sequence has a length of from 15 bp to 40 bp (e.g., from 15-35 bp, 15-30 bp, 15-25 bp, 17-40 bp, 17-35 bp, 17-30 bp, or 17-25 bp). In some cases, the barcode sequence has a length of 20 bp. Likewise, a barcode cassette can have any convenient length, and this length depends on the length of the barcode sequence plus the length of the constant region(s). In some cases, the barcode cassette has a length of from 40 bp to 100 bp (e.g., from 40-80 bp, 45-100 bp, 45-80 bp, 45-70 bp, 50-100 bp, 50-80 bp, or 50-70 bp). In some cases, the barcode cassette has a length of 60 bp.

[0120] A barcode or barcode cassette can be added using any convenient method. For example, a target DNA can be recircularized by ligation to a 3′-dT-tailed barcode cassette drawn from a pool of random barcode cassettes. The nicked hemiligation product can then be sealed and transformed into a host cell, e.g., a bacterial cell.

### Generating a Product

[0121] In some cases, a subject method includes a step of generating (e.g., from a generated library of circularized deletion DNAs) at least one of: linear double stranded DNA (dsDNA) products (e.g., via cleavage of the circular DNA, via PCR, etc.), linear single stranded DNA (ssDNA) products (e.g., via transcription and reverse transcription), linear single stranded RNA (ssRNA) products (e.g., via transcription), and linear double stranded RNA (dsRNA) products. If so desired, the linear products can then be introduced into a cell (e.g., mammalian cell). For example, a common technique for RNA viruses like polio, dengue, and Zika is to perform in vitro transcription from a dsDNA template (circular or linear) to make RNA, and then to introduce this RNA into cells (e.g., via electroporation, chemical methods, etc.) to generate viral stocks.

[0122] Also within the scope of the disclosure are kits. For example, in some cases a subject kit can include one or more of (in any combination): (i) a population of circular target DNAs as described herein, (ii) a transposon cassette as described herein, (iii) a sequence specific DNA endonuclease as described herein, (iv) one or more guide RNAs for a CRISPR/Cas endonuclease as described herein, (v) a population of barcodes and/or barcode cassettes as described herein, and (vi) a population of host cells, e.g., for propagation of the library, for assaying for viral infectivity, etc., as described herein. In some cases, a subject kit can include instructions for use. Kits typically include a label indicating the intended use of the contents of the kit. The term label includes any writing, or recorded material supplied on or with the kit, or which otherwise accompanies the kit.

### Deletion Mutants

[0123] The present disclosure provides HIV-1 deletion mutants, e.g., interfering, conditionally replicating, HIV-1 deletion mutants, and related constructs. For example, the present disclosure provides HIV-1 deletion mutants having one or more of the deletions identified in Table 4 relative to the wild type HIV-1 pNL4-3 sequence. The present disclosure also provides HIV deletion mutants having the sequences identified by SEQ ID NOs.: 56-116 in Table 4, e.g., hiv01-hiv60.

[0124] More broadly, the present disclosure identifies specific regions of the HIV-1 genome that should be retained and specific regions of the HIV-1 genome that can be deleted in order to provide interfering, conditionally replicating, HIV deletion mutants and related constructs. For example, in order to function as TI Ps, HIV-1 deletion mutants should retain all cis-acting elements. From the high MOI screen described herein with reference to FIGS. 26 and 27, these regions are identified as CAE1 (1115 bp: nt 1-1114 of NL4-3 provirus), CAE2 (126 bp: nt 4779-4905 of NL4-3), CAE3 (671 bp: nt 7710-8381 of NL4-3), and CAE4 (684 bp: nt 9025-9709 of NL4-3). The minimal size/identity of an HIV-1 TIP is a concatenation of these 4 elements (about a 2596 bp provirus). Expressed in common terms used by HIV-1 virologists, CAE1 corresponds to the 5′ LTR through the first 325 bp of gag. CAE2 is the cPPT/CTS. CAE3 is the RRE-SA7 (Rev Response Element to Splice Acceptor 7). CAE4 is the PPT and 5′ LTR.

[0125] In addition to retaining cis-acting elements, HIV-1 TI Ps which demonstrate interference with HIV-1 replication should have deletions in at least the gag and/or pol genes. For such TIPs, additional deletions in the accessory tract (vif, vpr, tat (exon 1), rev (exon 1), and/or vpu) may be more interfering than those with an intact accessory tract.

[0126] The deletion size for gag and/or pol may range, e.g., from about 800 bp to about 2500 bp, e.g., from about 900 bp to about 2400 bp, from about 1000 bp to about 2300 bp, from about 1100 bp to about 2200 bp, from about 1200 bp to about 2100 bp, from about 1300 bp to about 2000 bp, from about 1400 bp to about 1900 bp, from about 1500 bp to about 1800 bp, or from about 1600 bp to about 1700 bp.

[0127] In some embodiments, the deletion size for gag and/or pol may range from about 900 bp to about 2500 bp, from about 1000 bp to about 2500 bp, from about 1100 bp to about 2500 bp, from about 1200 bp to about 2500 bp, from about 1300 bp to about 2500 bp, from about 1400 bp to about 2500 bp, from about 1500 bp to about 2500 bp, from about 1600 bp to about 2500 bp, from about 1700 bp to about 2500 bp, from about 1800 bp to about 2500 bp, from about 1900 bp to about 2500 bp, from about 2000 bp to about 2500 bp, from about 2100 bp to about 2500 bp, from about 2200 bp to about 2500 bp, from about 2300 bp to about 2500 bp, or from about 2400 bp to about 2500 bp.

[0128] In some embodiments, the deletion size for gag and/or pol is about 800 bp, about 900 bp, about 1000 bp, about 1100 bp, about 1200 bp, about 1300 bp, about 1400 bp, about 1500 bp, about 1600 bp, about 1700 bp, about 1800 bp, about 1900 bp, about 2000 bp, about 2100 bp, about 2200 bp, about 2300 bp, about 2400 bp, or about 2500 bp.

[0129] The deletion size for the accessory tract (vif, vpr, tat (exon 1), rev (exon 1), and/or vpu) may range, e.g., from about 900 bp to about 1300 bp, e.g., from about 1000 bp to about 1200 bp, such as about 1100 bp. In some embodiments, the deletion size for the accessory tract (vif, vpr, tat, rev, and/or vpu) may range from about 1000 bp to about 1300 bp, e.g., from about 1100 bp to about 1300 bp, or from about 1200 bp to about 1300 bp. In some embodiments, the deletion size for the accessory tract (vif, vpr, tat (exon 1), rev (exon 1), and/or vpu) is about 900 bp, about 1000 bp, about 1100 bp, about 1200 bp, or about 1300 bp.

[0130] HIV-1 TI Ps which demonstrate interference with HIV-1 replication may also include, e.g., in addition to a deletion in gag and/or pol, a deletion in nef. Such a deletion may be, e.g., from about 150 bp to about 200 bp, e.g., about 175 bp.

### Exemplary Non-Limiting Aspects of the Disclosure

[0131] Aspects, including embodiments, of the present subject matter described above may be beneficial alone or in combination, with one or more other aspects or embodiments. Without limiting the foregoing description, certain non-limiting aspects of the disclosure numbered 1-56 are provided below. As will be apparent to those of ordinary skill in the art upon reading this disclosure, each of the individually numbered aspects may be used or combined with any of the preceding or following individually numbered aspects. This is intended to provide support for all such combinations of aspects and is not limited to combinations of aspects explicitly provided below:
[0132] 1. A method of generating a deletion library, comprising:

[0133] (a) inserting a transposon cassette comprising a target sequence for a sequence specific DNA endonuclease into a population of circular target DNAs to generate a population of transposon-inserted circular target DNAs;

[0134] (b) contacting the population of transposon-inserted circular target DNAs with the sequence specific DNA endonuclease to generate a population of cleaved linear target DNAs;

[0135] (c) contacting the population of cleaved linear target DNAs with one or more exonucleases to generate a population of deletion DNAs; and (d) circularizing the deletion DNAs to generate a library of circularized deletion DNAs.
[0136] 2. The method of 1, wherein the circular target DNAs are plasmids that comprise a viral genome.
[0137] 3. The method of 2, wherein the method further comprises introducing members of the library of circularized deletion DNAs into mammalian cells, and assaying for viral infectivity.
[0138] 4. The method of 2 or 3, wherein the method further comprises sequencing members of the library of circularized deletion DNAs to identify defective interfering particles (DIPs).
[0139] 5. The method of any one of 1-4, wherein the sequence specific DNA endonuclease is selected from: a meganuclease, a CRISPR/Cas endonuclease, a zinc finger nuclease, or a TALEN.
[0140] 6. The method of any one of 1-5, wherein the method comprises inserting a barcode sequence prior to or simultaneous with step (d).
[0141] 7. The method of any one of 1-6, wherein the one or more exonucleases comprises T4 DNA polymerase.
[0142] 8. The method of any one of 1-7, wherein the one or more exonucleases comprises a 3′ to 5′ exonuclease and a 5′ to 3′ exonuclease.
[0143] 9. The method of any one of 1-8, wherein the one or more exonucleases comprises RecJ.
[0144] 10. The method of any one of 1-9, wherein the step of contacting the population of cleaved linear target DNAs with one or more exonucleases is performed in the presence of a single strand binding protein (SSB).
[0145] 11. The method of any one of 1-10, wherein the transposon cassette comprises a first recognition sequence positioned at or near one end of the transposon cassette and a second recognition sequence positioned at or near the other end of the transposon cassette.
[0146] 12. The method of any one of 1-11, further comprising, prior to step (a), circularizing a population of linear DNA molecules to generate said population of circular target DNAs.
[0147] 13. The method of 12, wherein the population of linear DNA molecules comprises one or more PCR products, one or more linear viral genomes, and/or one or more restriction digest products.
[0148] 14. The method of any one of 1-13, further comprising introducing members of the library of circularized deletion DNAs into mammalian cells.
[0149] 15. The method of any one of 1-13, further comprising generating from the library of circularized deletion DNAs, at least one of: linear double stranded DNA (dsDNA) products, linear single stranded DNA (ssDNA) products, linear single stranded RNA (ssRNA) products, and linear double stranded RNA (dsRNA) products.
[0150] 16. The method of 15, further comprising introducing said linear dsDNA products, linear ssDNA products, linear ssRNA products, and/or linear dsRNA products into mammalian cells.
[0151] 17. A method of generating and identifying a defective interfering particle (DIP), comprising:

[0152] (a) inserting a target sequence for a sequence specific DNA endonuclease into a population of circular target viral DNAs, each comprising a viral genome, to generate a population of sequence-inserted viral DNAs;

[0153] (b) contacting the population of sequence-inserted viral DNAs with the sequence specific DNA endonuclease to generate a population of cleaved linear viral DNAs;

[0154] (c) contacting the population of cleaved linear viral DNAs with an exonuclease to generate a population of deletion DNAs;

[0155] (d) circularizing the deletion DNAs to generate a library of circularized deletion viral DNAs; and

[0156] (e) sequencing members of the library of circularized deletion viral DNAs to identify deletion interfering particles (DIPs).
[0157] 18. The method of 17, comprising, prior to step (a), circularizing a population of linear DNA molecules to generate said population of circular target viral DNAs.
[0158] 19. The method of 18, wherein the population of linear DNA molecules comprises one or more PCR products, one or more linear viral genomes, and/or one or more restriction digest products.
[0159] 20. The method of any one of 17-19, wherein the method comprises inserting a barcode sequence prior to or simultaneous with step (d).
[0160] 21. The method of any one of 17-20, further comprising (i) introducing members of the library of circularized deletion viral DNAs into mammalian cells; and (ii) assaying for viral infectivity.
[0161] 22. The method of any one of 17-20, further comprising:

[0162] (i) generating from the library of circularized deletion viral DNAs, at least one of: linear double stranded DNA (dsDNA) products, linear single stranded DNA (ssDNA) products, linear single stranded RNA (ssRNA) products, and linear double stranded RNA (dsRNA) products.
[0163] 23. The method of 22, further comprising, after step (i):

[0164] (ii) introducing said linear dsDNA products, linear ssDNA products, linear ssRNA products, and/or linear dsRNA products into mammalian cells; and

[0165] (iii) assaying for viral infectivity.
[0166] 24. The method of any one of 12-14, wherein the inserting of step (a) comprises inserting a transposon cassette into the population of circular target viral DNAs, wherein the transposon cassette comprises the target sequence for the sequence specific DNA endonuclease, and wherein said generated population of sequence-inserted viral DNAs is a population of transposon-inserted viral DNAs.
[0167] 25. The method of any one of 17-24, wherein the method comprises, after step (d), infecting mammalian cells in culture with members of the library of circularized deletion viral DNAs at a high multiplicity of infection (MOI), culturing the infected cells for a period of time ranging from 12 hours to 2 days, adding naive cells to the to the culture, and harvesting virus from the cells in culture.
[0168] 26. The method of any one of 17-25, wherein the method comprises, after step (d), infecting mammalian cells in culture with members of the library of circularized deletion viral DNAs at a low multiplicity of infection (MOI), culturing the infected cells in the presence of an inhibitor of viral replication for a period of time ranging from 1 day to 6 days, infecting the cultured cells with functional virus at a high MOI, culturing the infected cells for a period of time ranging from 12 hours to 4 days, and harvesting virus from the cultured cells.
[0169] 27. A transposon cassette, comprising a DNA molecule comprising transposase compatible inverted terminal repeats (ITRs) flanking a sequence of interest, wherein the sequence of interest comprises a first copy and a second copy of a recognition sequence for a first meganuclease.
[0170] 28. The transposon cassette of 27, wherein the sequence of interest includes a selectable marker gene, and said first and second copies flank the selectable marker gene.
[0171] 29. The transposon cassette of 28, wherein the selectable marker gene encodes an antibiotic resistance protein.
[0172] 30. The transposon cassette of any one of 27-29, comprising a first copy and a second copy of a recognition sequence for a second meganuclease.
[0173] 31. The transposon cassette of 30, wherein the first and second copies of the recognition sequence for the second meganuclease flank a selectable marker gene.
[0174] 32. The transposon cassette of any one of 27-31, wherein the transposase compatible inverted terminal repeats (ITRs) are cable of being recognized and utilized by a Tn5 transposase.
[0175] 33. An HIV-1 deletion mutant construct comprising all cis-acting elements of HIV-1 (CAE1 (1115 bp: nt 1-1114 of NL4-3 provirus), CAE2 (126 bp: nt 4779-4905 of NL4-3), CAE3 (671 bp: nt 7710-8381 of NL4-3), and CAE4 (684 bp: nt 9025-9709 of NL4-3)) and a deletion in the gag and/or pol genes.
[0176] 34. The HIV-1 deletion mutant construct of 33, wherein the construct comprises a deletion in one or more of the vif, vpr, tat, rev, and/or vpu genes.
[0177] 35. The HIV-1 deletion mutant construct of 33 or 34, wherein the deletion in the gag and/or pol genes is from about 800 bp to about 2500 bp in length.
[0178] 36. The HIV-1 deletion mutant construct of any one of 33-35, wherein the deletion in one or more of the vif, vpr, tat, rev, and/or vpu genes is from about 900 bp to about 1300 bp in length.
[0179] 37. The HIV-1 deletion mutant construct of any one of 33-36, comprising a deletion in the nef gene.
[0180] 38. The HIV-1 deletion mutant construct of 37, wherein the deletion in the nef gene is about 150 bp to about 200 bp in length.
[0181] 39. The HIV-1 deletion mutant construct of any one of 33-38, comprising one or more of the deletions identified in Table 4 relative to the wild type HIV-1 NL4-3 proviral sequence.
[0182] 40. The HIV-1 deletion mutant construct of any one of 33-39, wherein the construct does not include any heterologous nucleic acid sequence that encode a gene product.
[0183] 41. An HIV-1 deletion mutant construct comprising the nucleic acid sequence set forth in any one of the SEQ ID NOs. 56-116 set forth in Table 4.
[0184] 41(b). The HIV-1 deletion mutant construct of 41, wherein the construct is not replication competent and interferes with the replication of a wildtype HIV-1 virus, e.g., as identified in Table 9.
[0185] 42. A particle comprising:

[0186] a) an HIV-1 deletion mutant construct of any one of 33-41; and

[0187] b) a viral envelope protein.
[0188] 43. The particle of 41, wherein the envelope protein comprises gp120.
[0189] 44. The particle of 41, wherein the envelope protein is a non-HIV protein.
[0190] 45. A pharmaceutical formulation comprising:

[0191] a) the particle of any one of 42-44, or a particle comprising the construct according to any one 33-41; and

[0192] b) a pharmaceutically acceptable excipient.
[0193] 46. A package for use in delivering the construct of one of 33-41 to an individual, the package comprising a container comprising the formulation of 45.
[0194] 47. The package of 46, wherein the container is a syringe.
[0195] 48. A method of reducing human immunodeficiency virus viral load in an individual, the method comprising administering to the individual an effective amount of a pharmaceutical formulation of 45.
[0196] 49. The method of 48, further comprising administering to the individual an effective amount of an agent that inhibits an immunodeficiency virus function selected from viral replication, viral protease activity, viral reverse transcriptase activity, viral entry into a cell, viral integrase activity, viral Rev activity, viral Tat activity, viral Nef activity, viral Vpr activity, viral Vpu activity, and viral Vif activity.

[0197] 50. The method of 48 or 49, wherein the individual has been diagnosed with an HIV infection.
[0198] 51. The method of 48 or 49, wherein the individual is considered to be at higher risk than the general population of becoming infected with HIV.
[0199] 52. The method of any one of 48-51, further comprising administering to the individual an effective amount of an agent that reactivates reactivating latent HIV integrated into the genome of a cell infected with HIV.
[0200] 53. A biological fluid comprising the construct of any one of 33-41 or a derivative thereof.
[0201] 54. The biological fluid of 53, wherein the biological fluid is plasma.
[0202] 55. A method of generating a variant HIV-1 deletion mutant construct, the method comprising:

[0203] a) introducing the construct of any one of 33-41 into a first individual;

[0204] b) obtaining a biological sample from a second individual to whom the construct of any one of 33-41has been transmitted from the first individual, wherein the construct present in the second individual is a variant of the construct of any one of 33-41; and

[0205] c) cloning the variant construct from the second individual.
[0206] 56. The HIV-1 deletion mutant construct of any one 33-41, wherein genomic RNA encoded by the construct is produced at a higher rate than wild-type HIV when present in a host cell infected with a wild-type HIV, such that the ratio of construct-encoded gRNA to wild-type HIV gRNA is higher than about 1 in the cell, and wherein the construct has a basic reproductive ratio (R₀)>1.

[0207] It will be apparent to one of ordinary skill in the art that various changes and modifications can be made without departing from the spirit or scope of the invention.

### EXPERIMENTAL

[0208] The following examples are put forth so as to provide those of ordinary skill in the art with a complete disclosure and description of how to make and use the present invention, and are not intended to limit the scope of the invention nor are they intended to represent that the experiments below are all or the only experiments performed. Efforts have been made to ensure accuracy with respect to numbers used (e.g., amounts, temperature, etc.) but some experimental errors and deviations should be accounted for. Unless indicated otherwise, parts are parts by weight, molecular weight is weight average molecular weight, temperature is in degrees Centigrade, and pressure is at or near atmospheric.

[0209] All publications and patent applications cited in this specification are herein incorporated by reference as if each individual publication or patent application were specifically and individually indicated to be incorporated by reference.

[0210] The present invention has been described in terms of particular embodiments found or proposed to comprise preferred modes for the practice of the invention. It will be appreciated by those of skill in the art that, in light of the present disclosure, numerous modifications and changes can be made in the particular embodiments exemplified without departing from the intended scope of the invention. For example, due to codon redundancy, changes can be made in the underlying DNA sequence without affecting the protein sequence. Moreover, due to biological functional equivalency considerations, changes can be made in protein structure without affecting the biological action in kind or amount. All such modifications are intended to be included within the scope of the appended claims.

### Method to Produce a Deletion Library

[0211] The following examples demonstrate a high-throughput, molecular biology method, which used cycles of in vitro transposition and exonuclease digestion to generate random deletions in circular DNA (FIG. 1). The method allows control over the size of random deletions and optionally tags each member of the library with a molecular barcode to facilitate analysis by sequencing. The examples provided below demonstrate the generation of a library of tagged viral mutants. Performing multiple iterations of the cycle allows for the generation of multiply-deleted strains.

### Materials and Methods (for Examples 1-5)

### Determination of Minimal Conditions for Chewback Reactions (λ-HindII Digest)

[0212] Chewback reactions were conducted in NEB Buffer 2.1 (New England Biolabs), the composition of which at lx concentration is:

[0213] 50 mM NaCl

[0214] 10 mM Tris-Cl

[0215] 10 mM MgCl2

[0216] 100 ug/ml BSA

[0217] pH 7.9 @ 25° C.

λ DNA-HindIII digest, T4 DNA Polymerase (3 U/μl), RecJ_{f}(30 U/μl), and ET SSB (500 ng/μl), were obtained from New England Biolabs. Template DNA, λ DNA-HindIII digest (New England Biolabs, #N3012S), was prepared for chewback by heating to 60° C. for 3 min and immediately cooling on wet ice prior to addition to the chewback reaction to separate annealed cohesive cos ends.

[0218] A standard 50 μl chewback reaction was prepared on wet ice in a 0.2 ml PCR tube by combining:

[0219] 30.3 μl of dH₂O

[0220] 5.0 μl of 10X NEB 2.1

[0221] 10.0 μl of A DNA-HindIII digest (500 ng/μl)

[0222] 1.7 μl of T4 DNA Polymerase (3 U/μl)

[0223] 0.5 μl of RecJ_{f}(30 U/μl)

[0224] 0.5 μl of ET SSB (500 ng/μl)

[0225] The 50 μl reaction was immediately transferred from wet ice to a thermocycler (Bio-Rad) set to a block temperature of 37° C. and a heated lid temperature of 50° C., and incubated at 37° C. for 30 minutes to effect the double-strand chewback. After 30 minutes, 1 μl of 10 mM dNTPs was added (200 uM final dNTP concentration) and the reaction mixed and returned to 37° C. for 11 min to allow T4 DNA Polymerase to fill in recessed ends. After 11 minutes of fill-in, the reaction was halted by adding 2 μl of (500 mM EDTA, pH 8.0) to bring the EDTA concentration to 20 mM.

[0226] For the various dropout reactions depicted in FIG. 7, dH₂O was substituted for enzyme solutions. Lane 1: 0 μl enzyme, Lane 2: 1.7 μl T4 DNA Pol, Lane 3: 1.7 μl T4 DNA Pol, 0.5 μl ET SSB, Lane 4: 1.7 μl T4 DNA Pol, 0.5 μl RecJ_{f} , Lane 5: 1.7 μl T4 DNA Pol, 0.5 μl RecJ, 0.5 μl ET SSB.

### Determination of Chew-Back Rate

[0227] A ˜4.3 kbp dsDNA template was obtained by purifying the 4361 bp fragment of λ DNA-HindIII digest. Ten μg of λ DNA-HindIII digest (New England Biolabs, #N3012S) were run out on a 0.8% low melting point agarose/TAE gel (Lonza SeaPlaque GTG agarose) and the gel stained for 20 minutes at 25° C. with SYBR Safe (Thermo Fisher Scientific) diluted to lx concentration in TAE. DNA bands were visualized by placing the gel atop a blue light transilluminator (Lonza) and viewing the illuminated gel through UVEX S0360X blue light blocking safety glasses (Honeywell). Gel slices corresponding to the 4361 bp fragment were excised with a clean single-edge safety razor blade and transferred to tared microcentrifuge tubes. DNA was recovered by adding 0.1 gel volumes of 10× β-agarase I reaction buffer (New England Biolabs), melting gel slices briefly at 65° C., cooling to 42° C., and immediately adding 1 U of β-agarase I per 100 μl of molten gel (New England Biolabs). The mixture was incubated at 42° C. for 60 min to release DNA bound in the agarose matrix. DNA was precipitated from the digested fraction of the agarase reaction by adding 0.1 volumes of 3 M sodium acetate, pH 5.4, and 2 reaction volumes of 2-propanol. After mixing, the reaction was spun at 20000xg for 15 minutes at 25° C., and the supernatant aspirated. The DNA pellet was washed once with 900 μl of 70% ethanol, allowed to air dry briefly, then dissolved in (10 mM Tris-Cl, pH 8.0; 0.1 mM EDTA, pH 8.0).

200 μl of 2XdNTP buffer were prepared by combining:

[0228] 40 μl of 10X NEB 2.1 (2X final conc.)

[0229] 8 μl of 10 mM dNTP (400 μM final conc.)

[0230] 152 μl of dH₂O

and stored on wet ice.
150 μl of Stop Buffer was prepared by combining

[0231] 10 μl of 500 mM EDTA, pH 8.0 (33 mM final conc.)

[0232] 140 μl of dH2O

and stored at bench temperature (24 C).
A 50 μl chew-back reaction was prepared on wet ice in a 0.2 ml PCR by combining:

[0233] 30.3 μl of dH₂O

[0234] 5 μl of 10X NEB 2.1

[0235] 12 μl of 4.3 kbp dsDNA from above (-25 ng/μl)

[0236] 1.7 μl of T4 DNA Polymerase (3 U/μl)

[0237] 0.5 μl of RecJf (30 U/μl)

[0238] 0.5 μl of ET SSB (500 ng/μl)

The 50 μl reaction was immediately transferred to a thermocycler set to a block temperature of 37° C. and a lid temperature of 95° C. At (0, 5,10, 15, 20, 25, 30, 40, 50, 60, 70, 80 min) post-transfer to 37° C., a 4 μl aliquot was removed and combined with 4 μl of 2X dNTP buffer. These 8 μl reactions were incubated at 37° C. for 11 minutes to allow T4 DNA Polymerase to fill in the single-stranded tails that remain uncleaved by RecJ_{f}. After 11 minutes of fill-in, the reaction was halted by adding 12 μl of Stop Buffer to bring the EDTA concentration to 20 mM. Reactions were incubated on wet ice after addition of 12 μl of Stop Buffer.

[0239] dsDNA concentration was determined by a fluorometric method (PicoGreen, Thermo Fisher Scientific). 5 μl of each reaction was added to 95 μl of TE 10/1, pH 7.5. To this, 100 μl of a PicoGreen working stock (diluted to 1/200× in TE 10/1) were added in an Opti-F (Perkin Elmer) plate and read with an Enspire plate reader (Perkin Elmer) with 480 nm excitation and 520 emission filter, and fluorescence compared to a A DNA standard. All reactions were performed in triplicate.

[0240] Chewback rates at 37° C. were calculated by fitting the decay in dsDNA (fluoresence signal) at various timepoints to a linear regression model with the freely-available R statistical software. Chewback rates were determined to be ˜60 bp/min for 0-20 min and ˜50 bp/min for 0-80 min.

### Production of Transposon Insertion Library

[0241] Linear transposon cassettes were constructed by PCR from pTN5MK plasmid template. Oligos oTN5-F (5′-ctgtctcttatacacatctgcggccgc-3′) (SEQ ID NO: 15) and oTN5-R (5′-ctgtctcttatacacatctgcggccgc-3′) (SEQ ID NO: 16) were ordered with covalent 5′-phosphorylation modification and standard desalting purification from Integrated DNA Technologies. A 300 μl PCR master mix was prepared by mixing the following at bench temperature (24° C.):

[0242] 60 μl of 5x Q5 Polymerase Buffer (New England Biolabs)

[0243] 171 μl of dH₂O

[0244] 6 μl of 10 mM dNTP

[0245] 30 μl of 6 μM oTN5-F

[0246] 30 μl of 6 μM oTN5-R

[0247] 6 μl of pTN5MK (1 ng/μl)

[0248] 3 μl of HotStart Q5 Polymerase (2 U/μl) (New England Biolabs)

The 300 μl PCR master mix was briefly mixed, then distributed as 6×50 μl aliquots in 0.2 ml PCR tubes. PCR was performed using the following program in a thermocycler with heated lid (105° C.):

[0249] 1 cycle of 98° C. for 30 s

[0250] 15 cycles of
[0251] 98° C. for 10 s
[0252] 68° C. for 20 s
[0253] 72° C. for 50 s

[0254] 1 cycle of 72° C. for 300 s

[0255] HOLD at 10° C.

Post-thermocycling, the 6×50 μl reactions were pooled and linear transposon DNA purified with the Zymo DCC-5 Kit (Zymo Research) across two DCC-5 silica columns per the manufacturer's instructions. The DNA was eluted from each column by adding 12 μl of (10 mM Tris-Cl pH 8.0; 0.1 mM EDTA, pH 8.0), and the two eluted fractions were pooled to obtain ˜20 μl of purified transposon product. The concentration of linear DNA was determined to be ˜75 ng/μl by absorbance at 260 nm using a Nanodrop spectrophotometer (Thermo Fisher Scientific).

[0256] The ˜1.4 kbp linear transposon DNA was gel-purified by running out all 20 μl in a 2-cm wide well in a 0.8% agarose/TAE gel. Post-run, the gel was stained with 1X SYBR Safe (Thermo Fisher Scientific) in 1x TAE and a gel fragments corresponding to the 1.4 kbp linear transposon fragment excised upon illumination with a blue light transilluminator (Lonza) and viewed through UVEX S0360X blue light blocking safety glasses (Honeywell). DNA was recovered from the gel slice by adding 3 gel volumes of Buffer QG (Qiagen), and melting the gel slice by incubation at 37° C. with frequent mixing. The liquid gel mixture was applied to a DCC-5 silica column (Zymo Research) in repeated 600 μl volumes, interspersed by spinning the column at 10000xg for 40 seconds and discarding the flowthrough. The DCC-5 column was washed twice by adding 600 μl of Wash Buffer (Zymo Research), spinning the column at 10000xg for 60 seconds, and discarding the flow-though. The column was carefplly transferred to a 1.5 ml DNA LoBind tube (Eppendorf) and 30 μl of (10 mM Tris-Cl pH 8.0; 0.1 mM EDTA, pH 8.0) applied to the column bed and incubated for 1 minute. DNA was eluted by spinning the column for 1 minute at 10000xg . The concentration of linear DNA was found to be -30 ng/μl by determining the absorbance at 260 nm using a Nanodrop spectrophotometer (Thermo Fisher Scientific).

[0257] An in vitro transposition reaction was performed using recombinant EZ-Tn5 transposase (Epicentre) (at a concentration of 1 U/μl in 50% glycerol containing 50 mM Tris-HCl (pH 7.5), 0.1 M NaCI, 0.1 mM EDTA, 1 mM dithiothreitol, and 0.1% Triton® X-100) and 10X EZ-Tn5 reaction buffer (Epicentre) (composition: 0.50 M Tris-acetate (pH 7.5), 1.5 M potassium acetate, 100 mM magnesium acetate, and 40 mM spermidine).

[0258] A 10 μl in vitro transposition reaction was assembled by combining the following in a 0.2 ml PCR tube:

[0259] 2.0 μl of pNL4-3 (100 ng/μl) [14825 bp] [21.83 fmol]

[0260] 2.0 μl of TN5MK gel-purified transposon (10 ng/μl) [1434 bp] [22 fmol]

[0261] 1.0 μl of 10X EZ-Tn5 reaction buffer

[0262] 4.0 μl of dH2O

[0263] 1.0 μl of EZ-Tn5 transposase (1U/μl)

The reaction was mixed and the 0.2 ml PCR tube transferred to a thermocycler set to a block temperature of 37° C. and a heated lid temperature of 50° C. for a 2 hour incubation. After a 2 hour incubation, 1 μl of 1% (m/v) SDS solution was added and the reaction heated to 70° C. for 10 min to halt the reaction.

[0264] After equilibrating to room temperature, the entire volume of the reaction was pipetted upon a 0.025 μm membrane (13 mm outer diameter) (Millipore, #VSWP01300), floating on 25 ml of TE 10/0.1, pH 8.0. Drop-dialysis was allowed to proceed for 1 hour to remove inhibitory salts from the reaction mixture. After 1 hour the reaction volume was recovered and placed in a DNA LoBind tube (Eppendorf) on ice.

[0265] 1 μl of the reaction mixture (˜10%) was added to 40 μl of ice-cold electrocompetent E. coli (strain DH10B), and introduced into a chilled 0.1-cm sterile cuvette (Bio-Rad) placed on wet ice. Bacteria were electroporated with a Gene Pulser II electroporation system (Bio-Rad) with pulse settings of 1.7 kV, 25 μF, 200 Ω. Immediately post-electroporation, 960 μl of SOC (Thermo Fisher) were added and the cell mixture transferred to a sterile 15 ml polypropylene conical tube, and allowed to recover for 90 minutes at 30° C. After a 90 min recovery, 10 μl (1%) of the reaction was plated on one 10-cm plates containing solid media comprised of

[0266] Lysogeny Broth supplemented with 1% agar, 100 μg/mI carbenicillin, and 50 μg/mI kanamycin (LBA+Carb₁₀₀+Kan₅₀). The remaining 99% of the transformation volume was plated across 6×10-cm LBA+Carb₁₀₀ +Kan₅₀ plates. After incubation for 24 hours at 32° C., approximately 5000-10000 CFU were obtained across the six library plates. The bacteria were scraped from the agar surface using a sterile cell spreader after adding 5 ml of LB to each plate and recovered by centrifugation at 4000xg for 15 minutes. The bacterial pellet was resuspended in 6 ml of LB supplemented with 7% (v/v) DMSO and stored in 1.0 ml cryovials at −80° C. for future use.

Production of a Barcoded Deletion Library from an Insertion Library

[0267] One vial of the frozen insertion library (TN5MK in pNL4-3) was thawed and used to inoculate 500 ml of LB-Miller supplemented with 100 μg/ml carbenicillin and 50 μg/ml kanamycin (LBM+Carb₁₀₀+Kan₅₀) in a 2.8 L Fernbach flask. The culture was grown at 30° C. and 250 rpm in a shaking incubator (New Brunswick Scientific) until it reached an OD₆₀₀ of 1.0, whereupon a dry bacterial pellet was obtained by centrifugation and frozen at −80° C. Supercoiled plasmid DNA was obtained from the frozen bacterial pellet with a DNA Maxiprep Kit (Qiagen) per the manufacturer's instructions, and resuspended in TE 10/0.1 (10 mM Tris-Cl, pH 8.0; 0.1 mM EDTA, pH 8.0) at a concentration of >200 ng/μl.

[0268] Next, inserted transposons were excised from the plasmid insertion library to create linear DNA molecules by treatment with meganuclease I-Scel (New England Biolabs) in lx CutSmart Buffer (New England Biolabs), whose 1X composition as specified by the manufacturer is (50 mM potassium acetate, 20 mM Tris-acetate, 10 mM magnesium acetate, 1 mM DTT, 100 μg/ml BSA, pH 7.9 at 25° C.), by the manufacturer (New England Biolabs). Approximately 50 μg of insertion library DNA were digested in a 500 μl reaction by mixing the following in DNA LoBind tube (Eppendorf):

[0269] 105 μl of TN5MK in pNL4-3 (485 ng/μl)

[0270] 50 μl of 10X CutSmart Buffer (New England Biolabs)

[0271] 20 μl of I-Scel (5U/μl)

[0272] 335 μl of dH₂O

The reaction was incubated for 8 hours at 37° C., with brief mixing by inversion performed every 2 hours. After 8 hours, the reaction was cooled to bench temperature (24° C.), then extracted once with 500 μl of 25:24:1 phenol:chloroform:isoamyl alcohol equilibrated with TE, pH 8.0 (Thermo Fisher Scientific) followed by a second extraction with 500 μl of pure chloroform (Sigma). The upper aqueous layer was transferred to a new DNA LoBind tube, and 1.0 μl (25 μg) of co-precipitating GenElute Linear Polyacrylamide (Sigma) was added and the solution mixed to homogeneity.

[0273] Digested DNA was precipitated from the aqueous phase by MgCl₂/PEG-8000 precipitation. The ˜500 μl were adjusted to a final concentration of 12.5% (m/v) PEG-8000 and 20 mM MgCl₂ by adding 14 μl of 1 M MgCl₂ and 168 μl of 50% (m/v) PEG-8000. The reaction was inverted and flicked to mix, then spun at 20000xg for 60 min in a refrigerated microcentrifuge (Eppendorf) at 25° C. to pellet the precipitated DNA. After centrifugation, the pellet was difficult to visualize. The supernatant was removed and discarded and 900 μl of freshly-prepared 70% ethanol were added and the tube contents mixed by inverting the tube and flicking. Upon addition of 70% ethanol, the DNA pellet became readily visible. The tube was spun at 20000xg for 2 min to collect the pellet and the supernatant aspirated and discarded. An additional 900 μl of 70% ethanol were added to wash the pellet, and the tube spun again at 20000xg for 2 min to collect the pellet. All supernatant was carefully removed and the pellet dried briefly at room temperature (5 min) until no visible liquid remained. The DNA was solubilized by adding 60 μl of TE 10/0.1, heating to 42° C. for 20 minutes and mixed by flicking the tube. The concentration of linear DNA was found to be ˜750 ng/μl by a fluorometric assay (Quant-iT™ PicoGreen® dsDNA Assay Kit from Thermo Fisher Scientific). DNA was stored at 4° C. until future use.

[0274] Before the chewback reaction occurred, substrate DNA was heated to 60° C. for 3 minutes and immediately placed on wet ice to separate DNA aggregates. Four standard chewback reactions (reactions R5, R10, R15, R20) were prepared on wet ice in four separate 0.2 ml PCR tubes. Each reaction was prepared by combining the following in a separate 0.2 ml PCR tube:

[0275] 5.0 μl of 10X NEB 2.1

[0276] 36.3 μl of dH₂O

[0277] 6.0 μl of linearized pNL4-3/TN5MK insertion lib. (750 ng/μl)

[0278] 1.7 μl of T4 DNA Polymerase (3 U/μl)

[0279] 0.5 μl of RecJ_{f} (30 U/μl)

[0280] 0.5 μl of ET SSB (500 ng/μl)

All four 50 μl reactions were immediately transferred from wet ice to a thermocycler (Bio-Rad) set to a block temperature of 37° C., a heated lid temperature of 50° C., then incubated at 37° C. for a duration of 5-20 minutes to effect the double-strand chewback (R5: 5 min, R10: 10 min, R15: 15 min, R20: 20 min). At the appropriate time, the indicated reaction was removed from 37° C. incubation and 1 μl of 10 mM dNTPs were added (200 μM final dNTP concentration). The reaction was mixed and returned to 37° C. for 11 min to allow T4 DNA Polymerase to fill in recessed ends. After 11 minutes of fill in, the reaction was halted by adding 2 μl of (500 mM EDTA, pH 8.0) to adjust the EDTA concentration to 20 mM and placed on wet ice.

[0281] All four 50 μl chewback reactions (R5,R10,R15,R20) were pooled (200 μl volume) and then extracted once with 200 μl of 25:24:1 phenol:chloroform:isoamyl alcohol equilibrated with TE, pH 8.0, (Thermo Fisher Scientific). The ˜200 μl upper aqueous layer was transferred to a new DNA LoBind tube (Eppendorf), and desalted by running 2×100 μl through separate Sephacryl gel filtration columns (Microspin S-400 HR columns (GE Lifesciences)).

[0282] The 2×100 μl flowthrough fractions were pooled and the linear DNA blunt-ended by NEBNext End Repair Reaction Module (New England Biolabs). The composition of the 1X End Repair Reaction buffer is specified by the manufacturer as: 50 mM Tris-HCI, 10 mM MgCl₂, 10 mM DTT, 1 mM ATP, 0.4 mM dATP, 0.4 mM dCTP, 0.4 mM dGTP, 0.4 mM dTTP, pH 7.5 at 25° C.). The enzyme mix contains a blend of T4 Polynucleotide Kinase (10 U/μl) and T4 DNA Polymerase (3 U/μl). A 400 μl end-repair reaction was prepared by combining the following in a DNA LoBind tube (Eppendorf) on wet ice:

[0283] 200 μl of linearized deletion library (˜20 μg total)

[0284] 40 μl of 10X End Repair Buffer (NEB)

[0285] 140 μl of dH₂O

[0286] 20 μl of EndRepair Enzyme Mix (NEB)

The 400 μl reaction was distributed as 2×200 μl aliquots in 0.2 ml PCR tubes and incubated for 30 minutes in a thermocycler (Bio-Rad) with a block temperature set to 20° C.

[0287] After the 30 minute incubation, the 2×200 μl fractions were pooled and a single DNA LoBind tube (Eppendorf). The 400 μl pool was extracted once with 400 μl of 25:24:1 phenol:chloroform:isoamyl alcohol equilibrated with TE 10/1, pH 8.0, (Thermo Fisher Scientific), and once with 400 μl of pure chloroform (Sigma). The upper aqueous phase was transferred to a new DNA LoBind tube, and 1.0 μl (25 μg) of co-precipitating GenElute Linear Polyacrylamide (Sigma) was added and the solution mixed to homogeneity.

[0288] DNA was precipitated by MgCl₂/PEG-8000 precipitation. The remaining ˜400 μl aqueous phase volume remaining was adjusted to a final concentration of 12.5% (m/v) PEG-8000 and 20 mM MgCl₂ by adding 13 μl of 1 M MgCl₂ and 135 μl of 50% (m/v) PEG-8000. The reaction was inverted and flicked to mix, then spun at 20000xg for 60 min in a refrigerated microcentrifuge (Eppendorf) at 25° C. to pellet the precipitated DNA. After centrifugation, the pellet was translucent and difficult to visualize. The supernatant was removed and discarded and 900 μl of freshly-prepared 70% ethanol were added and the tube mixed. Upon addition of 70% ethanol, the DNA pellet became white, opaque, and was readily visible. The tube was spun at 20000xg for 2 min to collect the pellet and the supernatant aspirated and discarded. An additional 900 μl of 70% ethanol were added to wash the pellet, and the tube spun at 20000xg for 2 min to collect the pellet. All supernatant was carefully removed and the pellet dried briefly at room temperature (5 min) until no visible liquid remained. The DNA was solubilized by adding 60 μl of TE 10/0.1, heating to 42° C. for 20 minutes and mixed by flicking the tube. The concentration of linear DNA was found to be ˜200 ng/μl by determining the absorbance at 260 nm using a Nanodrop spectrophotometer (Thermo Fisher Scientific). DNA was stored at 4° C. until future use.

[0289] A 3′-dA overhang was added to the purified blunt-end barcode cassette with an a 3′->5′ exonuclease deficient Klenow Fragment of E. coli DNA Polymerase I (New England Biolabs). Linear, end-repaired library DNA from above was heated for 3 minutes at 60° C., then immediately transferred to wet ice to cool. A 100 μl 3′-dA tailing reaction was prepared by mixing the following in a 0.2 ml PCR tube:

[0290] 50 μl of end-repaired chewed-back library (˜200 ng/μl)

[0291] 10 μl of 10x NEB Buffer 2

[0292] 32 μl of dH₂O

[0293] 2 μl of 10 mM dTTP

[0294] 6 μl of Klenow Fragment (exo-) (5 U/μl).

The 100 μl reaction was incubated for 1 h at 37° C. in a thermocycler (Bio-Rad) with a block temperature set to 37° C. and a heated lid temperature of 50° C. After the 1 h incubation, the enzyme was heat-inactivated by incubation at 70° C. for 20 minutes. The reaction was allowed to cool, and then 10 μl of 10x Antarctic Phosphatase Reaction Buffer (New England Biolabs) (1X composition: 50 mM Bis-Tris-Propane HCI, 1 mM MgCl₂, 0.1 mM ZnCl₂, pH 6.0 at 25° C.) were added to the tube and the contents mixed and pulsed down. Two p1 of Antarctic Phosphatase (5U/μl) (NEB) were added, the reaction mixed, then incubated for 1 h at 37° C. The enzyme was heat-inactivated by heating the reaction to 70° C. for 5 minutes.

[0295] Next, the 5′-dephosphorylated, >8 kbp 3′-dA tailed vector was purified from <8 kbp pieces of DNA (including the excised transposon cassette) by gel purification. Twenty μl of 6X Gel Loading Dye, Blue (New England Biolabs) (1X composition: 2.5% (m/v) Ficoll-400, 11 mM EDTA, 3.3 mM Tris-HCI, 0.017% (m/v) SDS, 0.015% (m/v) bromophenol blue, pH 8.0 at 25° C.) were added to 100 μl of 5′-dephosphorylated, 3′-dA tailed vector, and 12 μl of the mixture loaded in 10 wells of a 0.8% low melting point agarose/TAE gel (Lonza SeaPlaque GTG agarose) and run alongside a DNA ladder (Quick Load 1 kb extend ladder, NEB). The gel was run at 85 V for 90 minutes, until the bromophenol blue bands migrated to the middle of the gel, then stained for 30 minutes with SYBR Safe (gel stained for 20 minutes at 25° C. with SYBR Safe (Thermo Fisher Scientific) diluted to lx concentration in TAE.

[0296] DNA bands were visualized by placing the gel atop a blue light transilluminator (Lonza) and viewing the illuminated gel through UVEX S0360X blue light blocking safety glasses (Honeywell). Gel slices corresponding to fragments of size between ˜8-15 kbp were excised with a clean single-edge safety razor blade and transferred to tared microcentrifuge tubes. DNA was recovered by adding 0.1 gel volumes of 10X β-agarase I reaction buffer (New England Biolabs), melting gel slices briefly at 65° C., cooling to 42° C., and immediately adding 1 U of β-agarase I per 100 μl of molten gel (New England Biolabs). The mixture was incubated at 42° C. for 60 min to release DNA bound in the agarose matrix. DNA was precipitated from the digested fraction of the agarase reaction by adding 0.1 volumes of 3 M sodium acetate, pH 5.4, and 2 reaction volumes of 2-propanol. After mixing, the reaction was spun at 20000xg for 15 minutes at 25° C., and the supernatant aspirated. The DNA pellet was washed twice with 900 μl of 70% ethanol, allowed to air dry briefly, then dissolved in 40 μl of (10 mM Tris-Cl, pH 8.0; 0.1 mM EDTA, pH 8.0), and allowed to solubilize overnight at 4 C. The concentration of vector DNA was found to be ˜150 ng/μl by determining the absorbance at 260 nm using a Nanodrop spectrophotometer (Thermo Fisher Scientific). A similar concentration (145 ng/μl) was determined by a fluorometric assay (Quant-iT™ PicoGreen® dsDNA Assay Kit from Thermo Fisher Scientific).

[0297] Blunt-end, 5′-phosphorylated, 60-bp barcode cassettes were prepared by PCR from ssDNA template. Oligonucleotides oBC20v1-F (5′-/5Phos/CCGTCCATGAAGGGTTCGAT-3′) (SEQ ID NO: 7) and oBC20v1-R (5′-/5Phos/ACGAATCTGCCGTTGCCATA-3′) (SEQ ID NO: 8) were ordered with covalent 5′-phosphorylation modification and standard desalting purification from Integrated DNA Technologies. Oligonucleotide pool oBC20v1-T (5′-CCGTCCATGAAGGGTTCGATNNNNNNNNNNNNNNNNNNNNTATGGCAACGGCAGATTCG T-3′) (SEQ ID NO: 9), where N indicates (A,C,G,T) was ordered with machine-mixed bases and standard desalting purification from Integrated DNA Technologies.

[0298] Two aliquots of 1.1 ml of a PCR master mix was prepared by mixing the following at bench temperature (24° C.) in two DNA LoBind Tubes (Eppendorf):

[0299] 550 μl of 2x Q5 HotStart HiFi Master Mix (New England Biolabs)

[0300] 385 μl of dH₂O

[0301] 27.5 μl of 20 μM oBC20v1-F (fwd oligo)

[0302] 27.5 μl of 20 μM oBC20v1-R (rev oligo)

[0303] 110.0 of 100 nM oBC20v1-T (template)

[0304] The 2×1.1 ml PCR master mixes were briefly mixed, then distributed as 40×50 μl aliquots in 0.2 ml PCR tubes. PCR was performed using the following program in a thermocycler with heated lid (105° C.):

[0305] 1 cycle of 98° C. for 30 s

[0306] 5 cycles of
[0307] 98° C. for 10 s
[0308] 65° C. for 75 s

[0309] 1 cycle of 65° C. for 300 s

[0310] HOLD at 10° C.

[0311] Post-thermocycling, the 40×50 μl PCR reactions were pooled and the barcode cassette purified across ten DCC-5 columns using a DNA Clean and Concentrator 5 kit (Zymo Research) per the manufacturer's instructions. DNA was eluted from each of the ten silica DCC-5 columns with 15 μl of (TE 10/0.1, pH 8.0) and the five eluted fractions pooled to obtain ˜150 μl of purified blunt-end barcode cassette. The concentration of blunt-end barcode cassette DNA was determined to be found to be ˜26 ng/μl by a fluorimetric assay (Quant-iT™ PicoGreen® dsDNA Assay Kit from Thermo Fisher Scientific). The blunt-end barcode cassette was stored at −80° C. in a DNA LoBind tube (Eppendorf) for future use.

[0312] A 3′-dT overhang was added to the purified blunt-end barcode cassette with an a 3′->5′ exonuclease deficient Klenow Fragment of E. coli DNA Polymerase I (New England Biolabs). A 300 μl reaction was prepared by mixing the following in a DNA LoBind tube (Eppendorf):

[0313] 100 μl of blunt-end purified 60-bp barcode cassette (26 ng/μl)

[0314] 30 μl of 10x NEB Buffer 2

[0315] 146 μl of dH₂O

[0316] 6 μl of 10 mM dTTP

[0317] 18 μl of Klenow Fragment (exo-) (5 U/μl).

The 300 μl reaction was distributed across as 3×100 μl aliquots in 0.2 ml PCR tubes and incubated for 3 h in a thermocycler (Bio-Rad) with a block temperature set to 37° C. and a heated lid temperature of 50° C.

[0318] Post-incubation, the 3×100 μl PCR reactions were pooled and the 3′-dT barcode cassette purified with a single DCC-5 columns using a DNA Clean and Concentrator 5 kit (Zymo Research) per the manufacturer's instructions. DNA was eluted with 80 μl of (TE 10/0.1, pH 8.0). The concentration of the 3′-dT blunt-end barcode cassette DNA was determined to be found to be ˜11 ng/μl by a fluorimetric assay (PicoGreen from Thermo Fisher Scientific). The 3′-dT barcode cassette was stored in 15 μl aliquots in DNA LoBind tubes (Eppendorf) at −80° C. in a DNA LoBind tube (Eppendorf) for future use.

[0319] Next, tailed barcode cassettes were ligated into the tailed vector and the DNA circularized using a Quick Ligation Kit (New England Biolabs). A 200 μl ligation reaction was prepared in a DNA LoBind tube by combining the following:

[0320] 7.0 μl of tailed vector pNL4-3 (150 ng/μl)

[0321] 10.5 μl of tailed barcode (11 ng/μl)

[0322] 82.5 μl of dH2O

[0323] 100.0 μl of 2X Quick Ligation Buffer

[0324] 10 μl of Quick Ligase (T4 DNA Ligase at 2000 U/μl)

The reaction was incubated on benchtop (24° C.) for 2 hours to perform the ligation at a 30:1 insert:vector molar ratio. The reaction was halted by adding 8 μl of (500 mM EDTA, pH 8.0) and mixing. Next, 10 μl of Proteinase K (800 U/ml) (New England Biolabs) were added, the reaction mixed, then incubated for 30 min at 37° C. to cleave bound T4 DNA Ligase from the DNA.

[0325] During the 30 minute Proteinase K treatment, 65 μl of T4 PNK (New England Biolabs) Master Mix was prepared by combining the following:

[0326] 6.5 μl of 10x T4 DNA Llgase Reaction Buffer

[0327] 57.5 μl of dH2O

[0328] 1.0 μl of T4 PNK (10 U/μl)

After 30 minutes, the reaction was purified with 1.8 reaction volumes (360 μl) of AMPure XP beads (Beckman-Coulter) per the manufacturer's direction, and eluted from the paramagnetic beads with 65 μl of the prepared T4 DNA Ligase master mix. The eluate was incubated at 37° C. for 60 min to phosphorylate DNA at the nicked sites.

[0329] After a 60 min incubation, the nicks were sealed by treatment with Taq DNA Ligase (New England Biolabs) in 1X Taq DNA Ligase Reaction Buffer (1X composition: 20 mM Tris-HCI, 25 mM potassium acetate, 10 mM magnesium acetate, 1 mM NAD+, 10 mM DTT, 0.1% (v/v) Triton X-100, pH 7.6 at 25° C.). A 100 μl reaction was prepared by combining the following in a 0.2 ml PCR tube:

[0330] 60.0 μl of T4 DNA Ligase Reaction from above

[0331] 10.0 μl of 10X Taq DNA Ligase Reaction Buffer

[0332] 26.0 μl of dH₂O

[0333] 4.0 μl of Taq DNA Ligase (40 U/μl)

The reaction was then introduced into a thermocycler (Bio-Rad) with block temperature of 50° C. and lid temperature of 75° C. for 15 minutes to seal nicks. Ligated DNA was purified from the ligations with 1.8 reaction volumes (180 μl) of AMPure XP beads per the manufacturer's instructions (Beckman Coulter Genomics), and eluted with 42 μl of TE 10/0.1, pH 8.0. The DNA was stored at 4° C. until use.

[0334] 15 μl of the 40 μl of purified ligation (˜30%) was electroporated into DH1OB E. coli, in 15 separate transformation reactions. In each transformation, 1 μl of the library was added to 40 μl of ice-cold electrocompetent E. coli (strain DH10B), and introduced into a chilled 0.1-cm sterile cuvette (Bio-Rad) placed on wet ice. Bacteria were electroporated with a Gene Pulser II electroporation system (Bio-Rad) with pulse settings of 1.7 kV, 25 μF, 200 Ω(time constant ˜5 msec). Immediately post-electroporation, 960 μl of SOC (Thermo Fisher) were added and the cell mixture transferred to a sterile 15 ml polypropylene conical tube, and allowed to recover for 90 minutes at 30° C.

[0335] After a 90 min recovery, the 15×1.0 ml recovered transformations were pooled and mixed. One hundred microliters of the 15 ml pool was added to 900 μl of SOB, vortexed to mix, then 100 μl of this dilution (corresponding to 1/1500 of the library pool) plated on each of 6×10-cm plates of containing solid media comprised of LB-Miller supplemented with 1% agar and 100 μg/ml carbenicillin (LBMA+Carb₁₀₀). The remaining 14.9 ml of the transformation was used to inoculate 500 ml of SOB+Carb₁₀₀ in a 2.8 L Fernbach flask and grown at 30° C. in a shaking incubator at 250 rpm for 24 h, until an OD600 of 3.0-4.0 was reached. The culture was chilled on wet ice and 450 ml of the 500 ml culture were harvested by centrifugation and used to prepare dry bacterial pellets for plasmid DNA isolation. The remaining 50 ml was spun down and resuspended in 14 ml of LB-Miller. To this 14 ml volume, 1.05 ml of pure DMSO (Corning) was added to adjust the concentration to 7% (v/v) DMSO. This solution was aliquoted to 15 sterile cryovials (Corning) and stored at −80° C. as seed stocks for the future library preparations.

[0336] The six plates had CFU counts of {69, 68, 73, 63, 79, 71}, avg of 70.5, which led to estimate of plated library size as 106,000 CFU (70.5×1500).

### Sequencing of Plasmid Libraries

[0337] NGS libraries were prepared for paired-end sequencing on the Illumina HiSeq/MiSeq platforms. Separate sequencing libraries were prepared with a Nextera XT Kit (Illumina) from 1 ng of pNL4-3 insertion library and 1 ng of pNL4-3Δ₁ deletion library. Transposon insertion and PCR enrichment were performed per the manufacturer's instructions, but the sublibraries were pooled and size-selected by running out on a 1.5% agarose gel, staining with 1X SYBR Safe (Thermo Fisher), and excising a gel fragment corresponding to DNA of size range of 350-500 bp. DNA was purified from the gel slice using Qiagen Buffer QG, Buffer PE (Qiagen), and DCC-5 columns (Zymo Research). The sublibraries were pooled and sequenced on a single lane of a HiSeq4000 (Illumina), using 2×125 b reads at the Center for Advanced Technology at University of California, San Francisco.

[0338] Transposon insertion locations were computed by filtering for reads containing an exact match of either mosaic end sequence of TN5MK, then extracting flanking regions to build an insertion map.

[0339] A lookup table matching deletion loci to barcode sequence was determined by 1) searching reads for the forward (oBC20v1-F (5′-CCGTCCATGAAGGGTTCGAT-3′) (SEQ ID NO: 10)) and reverse (oBC20v1-R (5′-ACGAATCTGCCGTTGCCATA-3′) (SEQ ID NO: 11)) common barcode sequences and extracting the intermediate 20 b; 2) assembling a list of barcode sequences; and 3) assigning flanking regions to each barcoded deletion using custom Python software.

### High MOI Passage and Sequencing of an HIV-1 Deletion Library

[0340] Virus pool was obtained by co-transfection of HEK 293T with pNL4-3 (WT virus) and the pNL4-3 deletion library. On the day of transfection, a suspension of 293T was obtained by trypsinization of subconfluent 15-cm plates of 293T and brought into single cell suspension by gentle passage through a 40 μm mesh filter (Corning). A cell count was obtained with an automated cell counter (Moxi, ORFLO), and cells were diluted to a concentration of 5E5/ml in DMEM+10% FBS. Thirty-six ml of this culture (1.8E7 cells) was added to 3 x T175 flasks. Next, 18 μg of pNL4-3, 18 μg of pNL4-3Δ₁, and 108 μl of 1 μg/μl PEI were added to serum-free DMEM supplemented with 25 mM HEPES and the volume brought to 3.6 ml with extra serum-free DMEM w/25 mM HEPES, incubated for 15 minutes, then added to the upright flasks. The upright flasks were gently rocked, then lowered to a horizontal position in a 37 C/ 5% CO2 incubator. Media was replaced after an overnight incubation (16-20 h), and virus was harvested at 40-48 hours post-transfection by passing through 0.45 μm sterile filters (Millipore). Virus stocks were concentrated by ultracentrifugation. Twenty-five ml of clarified supernatant were underlaid with a 6% (m/v) iodixanol in DPBS-CMF in SW28 ultracentrifuge tubes, and then adjusted to 38.6 ml final volume with additional clarified supernatant. The tubes were spun for 90 min at 20000 rpm in an SW28 rotor at 4 C. Supernatant was decanted and the invisible viral pellets resuspended in pure heat-inactivated FBS and frozen at −80 C.

[0341] The virus pool was cultivated by high-MOI passage on MT-4, an HIV-permissive human T cell line. On day −1, virus stocks were titrated on 2E6 MT-4 in 6-well plates and cells were stained for intracellular p24 production at 24 hours post infection with a PE-labelled monoclonal antibody (KC57-RD1, BD). On day 0 (0 hours post infection (hpi)), 2E6 MT-4 were infected at an MOI of 5-20 with the virus pool containing WT HIV-1 and tagged HIV-1 deletion mutants for 4 hours in a volume of 2 ml, then transferred to a T25 flask containing 10 ml of MT-4 at a concentration of 1E6/ml. On day 2 (40 hpi), the 12 ml of culture was transferred to a T175 containing 60 ml of MT-4 at a concentration of 1 E6/ml. On day 3 (70-72 hpi), supernatant from the MT-4 was clarified by centrifugation and 0.45 μm filtration, and then concentrated by ultracentrifugation as described above. This cycle corresponds to 3 rounds of HIV-1 replication (completed on day 1, day 2, day 3). The cycle was repeated a total of four times (12 passages / rounds of replication) to select for deletion mutants that could be efficiently mobilized by HIV-1 in high MOI passage and retained all necessary cis-acting elements. The passage scheme was conducted with 3 biological replicates.

[0342] Viral RNA was isolated from frozen aliquots of the concentrated virus pool at various time points (passage 0, passage 3, passage 6, passage 9, passage 12) using a QIAmp Viral RNA Mini Kit (Qiagen) per the manufacturer's instructions with two exceptions: 1) carrier RNA was replaced with 5 μg of linear polyacrylamide (Sigma) per isolation 2) 5E6 copies of bacteriophage MS2 RNA (Roche) were spiked in per isolation.

[0343] Purified RNA was reverse-transcribed with Superscript III (Thermo Fisher) and Random Primer Mix (New England Biolabs). cDNA was used as template in real-time qPCR to quantitate barcode cassette concentrations with oligonucleotides oBC20v1-F (5′-/5Phos/CCGTCCATGAAGGGTTCGAT-3′) (SEQ ID NO: 12) and oBC20v1-R (5′-/5Phos/ACGAATCTGCCGTTGCCATA-3′) (SEQ ID NO: 13), and compared to a standard curve prepared with dilutions of a barcode standard, oBC20v1-T (5′-CCGTCCATGAAGGGTTCGATNNNNNNNNNNNNNNNNNNNNTATGGCAACGGCAGATTCG T-3′) (SEQ ID NO: 14) in 10 μl reactions with Fast SYBR® Green Master Mix (Thermo Fisher). vRNA samples were not DNasel-treated before reverse transcription, but DNA levels were acceptably low (-RT controls had barcode levels of <1/1000x of +RT reactions).

[0344] Illumina sequencing libraries were prepared by a modification of a method specified in Mandell2015 (Mandell et al, 2015 (doi:10.1038/nature14121)). Barcode cassettes were amplified from cDNA from above using a minimum number of cycles (typically 12-18) to prevent overamplification (post log-phase PCR) as evidenced by the RT-qPCR data from above. Illumina adaptors were added by two rounds of PCR (5 cycles each), to add phasing adaptors, random barcodes, and multiplexing barcodes. Sublibraries were size-selected on 5% TBE polyacrylamide gels and pooled for sequencing.

[0345] 20-30 sublibraries were sequenced on two lanes of a HiSeq4000 (Illumina) (spiked with 25% PhiX), using a single 1×50 b reads at the Center for Advanced Technology at University of California, San Francisco.

[0346] Barcodes were tallied using custom Python software and matched to deletion loci using the lookup table prepared previously to calculate deletion depth.

### Construction of Transposon Cassettes (TN5MC and TN5MK)

[0347] Transposon cassettes were ordered in 3 pieces as synthetic dsDNA (<500 bp) (gBlocks, Integrated DNA Technologies) and cloned by Gibson Assembly into pUC19 (linearized at the BamHI site). For the chloramphenicol-resistance transposon cassette (TN5MC), chloramphenicol-resistant pTN5MC transformants were selected on LB supplemented with 100 μg/ml carbenicillin and 33 μg/ml chloramphenicol at 37 C. For the kanamycin-resistance transposon cassette (TN5MK), kanamycin-resistant pTN5MK transformants were selected on LB supplemented with 100 μg/ml carbenicillin and 50 μg/ml kanamycin.

### EXAMPLE 1

### Construction of an Insertion Library

[0348] The starting template was a population of circular target DNAs, in this case copies of the same plasmid, where the plasmid included sequence of a wildtype viral genome (FIG. 1, FIG. 2). A target sequence for a sequence specific DNA endonuclease, in this case recognition sequences for two meganuclease restriction sites, were introduced into the starting template via in vitro transposition with a modified Tn5 transposon and hyperactive Tn5 transposase (FIGS. 3-4). The custom transposon cassette harbored a drug-selectable marker (Kan^{R} or Cm^{R}) flanked by meganuclease recognition sites I-Scel and I-Ceul (FIG. 3, FIG. 4, FIG. 20). E. coli were transformed with transposed DNA and insertion mutants were selected by plating on antibiotic-supplemented media. After recovery of the transposed DNA, the result was a population of plasmids, each containing a single transposon insertion, i.e., a population of transposon-inserted circular target DNAs. FIG. 5 depicts a plot of transposon insertion location vs genome position for transposon insertions (transposon-inserted circular target DNAs) generated using the methods disclosed herein. The data presented in this figure (obtained by deep-sequencing the transposon insertion library) show that transposons were integrated at a diversity of sites.

### EXAMPLE 2

### Generation of Tagged Deletion Mutants

[0349] Transposon-inserted DNA was digested with I-Scel or I-Ceul, liberating the inserted transposon cassette and generating a linearized molecular clone (FIG. 6). Deletions were performed in a one-pot reaction by treating linearized DNA with a mixture of three enzymes: T4 DNA Polymerase (a 3→45′ exonuclease without dNTPs), RecJ (a 5′→43′ exonuclease) and single-strand binding protein (SSB) (FIG. 6, FIG. 7, FIG. 8). Here, the double-end chew-back rate proceeded at a rate of 50 bp/min at 37° C. and at a reduced rate at lower temperatures (FIG. 9). Thus, modulating the duration and temperature of the chewback reaction allowed for control of deletion size.

[0350] Vector DNA ends were blunted, dephosphorylated, and modified by a single 3′-dA overhang (FIG. 6). The vector was recircularized by ligation to a 3′-dT-tailed barcode cassette drawn from a pool of random barcode cassettes (a 60 bp cassette including 20 bp random barcode flanked by 20 bp primer binding sites) (FIG. 6). The nicked hemiligation product was sealed and transformed into the host bacteria. In this way, each deletion mutant was tagged with a unique barcode cassette with high probability.

### EXAMPLE 3

### Sequencing to Map Barcodes to Deletion Loci

[0351] The plasmid library was fragmented and deep-sequenced (e.g., 2×125 bp reads, HiSeq4000), and the results used to link barcode (bc) sequences to deletion sites (FIG. 10). The result was a lookup table mapping the set of barcodes (B={b₁,b₂,b₃, . . . } to deletion loci (D=d₁,d₂,d₃, . . . ).

[0352] Each of the m deletion mutants is described as a sparse genotype bitvector m of dimensions (L×1), where L is the integer length of the undeleted wildtype sequence. Within the mutation bitvector m, l's indicate that a base has been deleted and 0's indicate that a base has been retained. In general, deep sequencing the barcoded libraries, allows for computation of a count c, for each mutant by measuring the number of times a particular barcode is observed. The deletion depth vector d (the deletion depth profile) has dimensions (L×1) and is computed by multiplying genotype matrix M by count vector c, yielding (d=Mc). The genotype matrix M is a (0,1)-matrix of dimension L×m, while the count vector has dimensions (m×1). The genotype matrix M describes the genotypes of the barcoded mutants, where column i is the genotype bitvector of deletion mutant i. Within the count vector c, element i describes how many times the barcode associated with mutant i was observed.

[0353] FIG. 11 shows a histogram of deletion sizes that were generated when generating an HIV-1 deletion library (pNL4-3Δ₁). As can be seen in the figure, a diverse range of different sized deletions were generated. FIG. 12 shows a plot of deletion depth that was obtained for the same library as FIG. 11. The plot demonstrates that the deletion library was comprehensive (coverage over the genome) and relatively unbiased. The valley surrounding ori/bla (required for plasmid maintenance in culture) shows that bacteria harboring plasmids with deletions in this region were select against.

### EXAMPLE 4

### An Unbiased Procedure to Identify Essential Viral Cis-Acting Elements

[0354] In order to function as an effective TIP, a viral mutant retains the necessary cis-acting elements required for replication when complemented by the wildtype genome. The cis-acting elements of HIV-1 were mapped by producing virus from the deletion library (by transfection of the plasmid library into 293T) and using this virus pool to infect target cells at high multiplicity of infection (MOI) (FIG. 13). Sequencing of the barcodes at critical points in the infection cycle (transcription, encapsidation, reverse transcription, integration, etc.) and referencing the barcode/deletion lookup table allowed for the identification of regions where deletions were tolerated in each step of the HIV-1 replication cycle (FIG. 14). With high MOI infection, trans factors were provided by co-infection with replication-competent virus. Therefore, genome regions that can tolerate deletions (as measured by enrichment of deletion sites) correspond to trans-acting elements while regions that are intolerant of deletion correspond to cis-acting elements (FIG. 15, FIG. 16, FIG. 17, FIG. 18).

### EXAMPLE 5

### Screening for TIPs by High- and Low-MOI Passage of Deletion Mutants

[0355] High multiplicity of infection (MOI) passage of viruses is a method to generate defective interfering particles/therapeutic interfering particles. Here cells are infected by more than one virus, which allows for complementation of defective viruses by wildtype counterparts.

[0356] In this case, an HIV (NL4-3) viral deletion library was generated (i.e., the target DNAs included an HIV genome), and cells were then infected at high-MOI (MOI of 5-20). Repeated passaging of the deletion mutant libraries at high-MOI selected for mutants that could be mobilized effectively by HIV-1 (FIG. 17, FIG. 18). However, in some cases a method such as this may select for TIPs which can be mobilized effectively by the wildtype virus, but are cytopathic in the absence of the wildtype coinfection.

[0357] In a more stringent screen, low-MOI infection (MOI of <1) of target cells with tagged deletion libraries and high-MOI infection (MOI≥1) of the transduced population with wildtype virus (HIV-1) is alternated to mobilize TIPs to naive cells (FIG. 19). In between successive infections, the cells can be propagated in the presence of a drug to prevent further rounds of replication (e.g., Darunavir, an HIV-1 protease inhibitor). During this recovery period, HIV-1 infected cells will be killed, but cells transduced by well-behaving mutants (which do not produce cell-killing trans-factors) will be maintained. In this fashion, mutants can be selected for which do not kill their transduced host-cell but can mobilized during wildtype virus coinfection.

[0358] In both screens, the profile of deletion loci are monitored by their deletion barcodes (lineage tracking) and the fittest strains can be isolated (or cloned, synthesized) and characterized.

### EXAMPLE 6

### High-MOI Screen of an HIV-1 Random-Deletion Library

[0359] This Example demonstrates how a viral pool produced from a plasmid random deletion library can be screened for cis and trans-acting elements by high-MOI passage, and how to identify deletion mutants that are not replication-competent, but can be mobilized by the wildtype virus. Thus from first principles, cis- and trans-acting elements of viruses can be identified as well as transmissible antivirals.

### Materials and Methods

### Cell Culture Methods

[0360] 293T (synonyms: HEK 239T, 293tsA1609neo) were obtained from the American Type Culture Collection (ATCC, #CRL-3216). Adherent 293T were propagated in D10 media, comprised of Dulbecco's Modified Eagle's Medium (DMEM; Corning, #10-013-CV) supplemented to a final concentration of: 10% (v/v) heat-inactivated fetal bovine serum (FBS) (Corning, #35-011-CV), 100 IU/ml penicillin & 100 μg/ml streptomycin (Corning, #35-002-CI), 25 mM HEPES (Thermo Fisher, #15630080), and 2 mM L-alanyl-L-glutamine (Corning, #25-015-CI). The cell line was cultivated in 15-cm polystyrene dishes in a humidified incubator at 37° C. with 5% CO₂. Subcultures were prepared by removing media, washing once with DPBS-CMF, treating with 0.25% Trypsin/2.21 mM EDTA in HBSS for 2-5 min at 37° C., then quenched by adding an equal volume of D10.

[0361] MT-4 cells (a CD4⁺ T cell line) were obtained through the NIH AIDS Reagent Program, (Catalog #120). Cells were propagated in R10 media, comprised of Roswell Park Memorial Institute (RPMI-1640; Corning, #10-040-CV) supplemented to a final concentration of: 10% (v/v) heat-inactivated fetal bovine serum (FBS) (Corning, #35-011-CV), 100 IU/ml penicillin & 100 μg/mI streptomycin (Corning, #35-002-CI), 10 mM HEPES (Thermo Fisher, #15630080), and 2 mM L-alanyl-L-glutamine (Corning, #25-015-CI). The cell line was cultivated in sterile polystyrene T flasks within in a humidified incubator at 37° C. with 5% CO₂. Once established, cultures were maintained a density of 2·10⁶-2·10⁷ cells per ml. Subcultures were prepared by diluting cultures with fresh R10 media to about 5·10⁶ cells/ml every 2-3 days.

### Production of Viral Stocks by Transfection of 293T

[0362] A virus pool was obtained by co-transfection of 293T with pNL4-3 μlasmid (WT virus) and the pNL4-3 deletion library (pNL4-3Δ₁) plasmid pool prepared above in Examples 1 and 2. On the day of transfection, a suspension of 293T was obtained by trypsinization of subconfluent 15-cm plates of 293T and brought into single cell suspension by gentle passage through a 40 μm nylon mesh filter (Corning #352340). A cell count was obtained with an automated Coulter cell counter (Moxi, ORFLO), and cells were diluted to a concentration of 5·10⁵ cells/ml in D10. Thirty-six ml of this suspension (1.8.10⁷ cells) were added to 3xT175 flasks.

[0363] Next, 18 μg of pNL4-3, 18 μg of pNL4-3Δ₁, and 108 μl of a 1 μg/μl polyethyleneimine (PEI) solution (prepared from 25 kDa linear PEI; Polysciences #23966-1) were added to serum-free DMEM supplemented with 25 mM HEPES and the volume brought to 3.6 ml with additional serum-free DMEM with 25 mM HEPES, incubated at bench temperature (24° C.) for 15 min, then added to the upright T175 flasks. The upright T175 flasks were gently rocked, then lowered to a horizontal position in a 37° C./5% CO₂ incubator. Media was replaced after an overnight incubation (range 16-20 h), and virus was harvested at 40-48 hours post-transfection by passing the virus-containing growth media through 0.45 μm sterile PVDF filters (Millipore, #SE1M003M00).

[0364] Virus stocks were concentrated by ultracentrifugation. Twenty-five ml of 0.45 μm filtered supernatant were underlaid with 5 ml of a 6% (m/v) iodixanol (Sigma #D1556) in DPBS (Calcium/Magnesium Free) solution in SW28 ultracentrifuge tubes (Beckman-Coulter #344058), then adjusted to a 38.5 ml final volume with additional 0.45 μm clarified filtrate. The tubes were spun for 90 min at 20,000 rpm in an SW28 rotor (Beckman-Coulter) at 4° C. The virus-depleted supernatant was decanted and the invisible viral pellets resuspended in pure heat-inactivated FBS and stored frozen in single-use aliquots at -80° C.

### Titration of Viral Stocks

[0365] Infectious HIV-1 viral stocks were titrated by infecting cultures of MT-4 in 6-well plates with viral inocula and scoring for HIV p24-producing cells at 24 hours post-infection. HIV p24-producing cells included cells that are productively infected with wildtype HIV-1 and/or deletion mutants that are still competent to produce p24.

[0366] Briefly, 100 μl of HIV-1 inoculum was added to 1.0 ml of R10 containing 2·10⁶ MT-4, mixed briefly, then incubated for 4 hours at 37° C. After four hours, an additional 1.0 ml of R10 was added and the infection was allowed to proceed for an additional 20 hours (a single-round of replication). At 24 hours post-infection, cultures were fixed by adding 0.1 volumes of 20% formaldehyde (tousimis #1008A) (final concentration 2.0%) and incubated for at least 1 hour at 4° C. to inactive infectious virus.

[0367] Formaldehyde-fixed cells were permeabilized by treatment with 75% ice-cold methanol for 10 minutes, then stained with a phycoerythrin-labelled monoclonal antibody against HIV-1 p24 (KC57-RD1,Beckman Coulter #6604667) in a staining buffer (DPBS-CMF+2% FBS+2 mM EDTA+0.1% IGEPAL-CA630) for 30 min before washing once in stain buffer without antibody. At least 50,000 live cells were counted by flow cytometry on a FACS Calibur DxP8. Gates were drawn based upon stained naïve cell population. A representative example is shown in FIG. 25.

[0368] Values are reported as I U/ml, where an IU (infectious unit) is the amount of virus needed to produce a p24+MT-4 cell at 24 hpi. As shown in FIG. 25, titers of concentrated HIV-1 stocks averaged 5.10⁷ I U/ml.

High-MOI Passage of Virus Produced from a Random Deletion Library

[0369] A virus pool containing wildtype HIV-1 (NL4-3) and deletion mutants (NL4-3Δ₁) was prepared by co-transfection of 293T with equal masses of the pNL4-3Δ₁ library and the parental wildtype plasmid (pNL4-3) as described above. The virus-containing supernatant was collected, clarified by 0.45 μm filtration, then concentrated by ultracentrifugation at 48 hpi and titrated. The concentrated stock was used to infect MT-4 at high multiplicity of infection (>5) and passaged at high MOI (>5) as detailed below and in FIG. 26.

[0370] On day 0 (0 hpi), 2·10⁶ MT-4 were infected at an MOI of 5-20 with the virus pool containing WT HIV-1 and tagged HIV-1 deletion mutants for 4 hours in a volume of 2 ml, then transferred to a T25 flask containing 10 ml of MT-4 at a concentration of 10⁶ cells/ml. On day 2 (40 hpi), the 12 ml of culture was transferred to a T175 flask containing 60 ml of MT-4 in R10 at a concentration of 10⁶ cells/ml. On day 3 (70-72 hpi), supernatant from the MT-4 was clarified by centrifugation and 0.45 μm filtration, and then concentrated by ultracentrifugation as described above. This cycle corresponds to 3 rounds of HIV-1 replication (completed on day 1, day 2, day 3). The cycle was repeated a total of four times (12 passages/rounds of replication) to select for deletion mutants that could be efficiently mobilized by HIV-1 in high MOI passage and retained all necessary cis-acting elements. The passage scheme was conducted with 3 biological replicates. A diagram of the passage scheme is shown in FIG. 24.

[0371] Virus stocks were titrated by infecting MT-4 and scoring for cells producing HIV Gag (p24) by flow cytometry.

[0372] Values are reported as I U/ml, where an IU (infectious unit) is the amount of virus needed to produce a p24+MT-4 cell at 24 hpi. As shown in FIG. 25, titers of concentrated stocks averaged 5.10⁷ IU/ml.

[0373] Although viral stocks were of sufficient titer to provide good coverage of the library (2·10⁶ cells infected at an MOI of 5 yields 10⁷ infections), it was necessary to confirm that high MOI would be maintained in subsequent passages.

[0374] In this scheme, shown in FIG. 26, virus can be transmitted by cell-to-cell and cell-free transfer. We confirmed that high MOI could be maintained by staining samples of cells for HIV p24 production throughout the passage. A representative example shown in FIG. 27 shows that >99% of cells were p24⁺ at various points in the transfer, indicating a high-MOI passage. These passage conditions were maintained throughout the passage scheme and the p24-staining procedure was repeated during each week of passage to confirm that high MOI passage conditions were maintained. The high MOI passage conditions select for two phenotypes of virus: (a) replication-competent viruses and (b) replication-defective viruses that are efficiently trans-complemented by wildtype virus (mobilized).

Isolation of vRNA and Quantitation of WT and Deletion Mutant Levels

[0375] Viral RNA was isolated from frozen aliquots of the concentrated virus pool at various time points (passage 0, passage 3, passage 6, passage 9, passage 12) using a QIAmp Viral RNA Mini Kit (Qiagen) per the manufacturer's instructions with two exceptions: (1) carrier RNA was replaced with 5 μg of linear polyacrylamide (Sigma #56575-1ML) per isolation (2) 5·10⁶ copies of bacteriophage MS2 RNA (Roche, #10165948001) were spiked-in per isolation.

[0376] Total cellular RNA from 293T cells was isolated using Trizol (Life Technologies) from cell pellets obtained at the time of viral harvest. A poly(A) fraction, representing mRNA, was isolated by annealing total RNA to magnetic (dT)₂₅ beads to pull down polyadenylated transcripts using a commercial kit (NEBNext Poly(A) mRNA magnetic isolation module). Purified RNA was reverse-transcribed with Superscript III (Thermo Fisher) and Random Primer Mix (New England Biolabs). cDNA was used as template in real-time qPCR to quantitate barcode cassette concentrations with oligonucleotides oBC20v1-F (CCGTCCATGAAGGGTTCGAT) (SEQ ID NO:17) and oBC20v1-R (ACGAATCTGCCGTTGCCATA) (SEQ ID NO:18) and compared to a standard curve prepared with dilutions of a barcode standard, oBC20v1-T: CCGTCCATGAAGGGTTCGATNNNNNNNNNNNNNNNNNNNNTATGGCAACGGCAGATTCG T (SEQ ID NO:19), in 10 μl reactions with Fast SYBR Green Master Mix (Thermo Fisher). Levels of total HIV RNA were estimated by levels of HIV pol with oligos oNL43pol-F (GAGACAGGGCAAGAAACAGC) (SEQ ID NO:20) and oNL43pol-R (AACAGGCGGCCTTAACTGTA) (SEQ ID NO:21). Samples were normalized for recovery by determining levels of MS2 RNA recovered by oligos oMS2-F (TCCTGCTCAACTTCCTGTCGAG) (SEQ ID NO:22) and oMS2-R (CAGGTCAAACCTCCTAGGAATG) (SEQ ID NO:23) (sequences from (Vermeire, J. et al. PLoS One, 7, e50859 (2012)). Samples were not DNasel-treated before reverse transcription, but levels of background DNA were acceptably low (-RT controls had barcode levels of <1/1000x of +RT reactions).

[0377] Viral RNA was purified from concentrated viral stocks and cell pellets at various points during the high MOI passage. During purification of viral RNA, 5·10⁶ copies of a heterologous sequence (bacteriophage MS2) were spiked in to each purification to normalize recoveries and to serve as a normalization and recovery control.

[0378] Levels of barcode cassette (BC) and HIV-1 pol (POL) were determined by RT-qPCR. Genomes containing a tagged deletion will harbor BC and genomes that retain the wildtype pol sequence (all wildtype HIV and mutants that do not have a deletion in pol). Thus BC signal correlates with the concentration of tagged deletion mutants and POL as a measure of total viral genome concentration (provided that pol deletion mutants are in the minority). RT-qPCR data for supernatant concentrations are listed in Table 1 as quantification cycle (C_{q}) values. Higher values of C_{q} indicate reduced abundance of a template molecule; lower values of C_{q} indicate increase abundance and the scale is logarithmic in base 2, with a ΔC_{q} of 1 corresponding to an ≈2-fold difference and a ΔC_{q} of 3 corresponding to an ≈8-fold difference. Importantly, the BC primers form a stable primer dimer structure that is amplified even without the presence of template (no-template controls: NTC reactions). The limit of detection for BC is somewhere in the interval of C_{q} 29-35. True primer dimers and true barcode samples can be differentiated by a melt-curve after cycle 40 of qPCR.

### Results

[0379] The results of the RT-qPCR analysis are provided in Table 1 below.

TABLE 1

| sample | Flask(s) | Δ lib. | barcode | HIV_pol | MS2 |
|---|---|---|---|---|---|
| 293T | ABC | − | 34.8 ± 2.2 | 13.9 ± 0.6 | 30.8 ± 0.2 |
| 293T | KLM | + | 16.9 ± 0.2 | 13.1 ± 0.3 | 29.1 ± 0.8 |
| passage 3 | C | − | 34.8 ± 0.1 | 11.0 ± 0.1 | 29.6 ± 0.3 |
| passage 3 | K | + | 16.8 ± 0.2 | 11.9 ± 0.1 | 30.7 ± 0.3 |
| passage 3 | L | + | 15.8 ± 0.8 | 11.5 ± 0.1 | 30.7 ± 0.2 |
| passage 3 | M | + | 16.5 ± 0.2 | 11.2 ± 0.1 | 30.6 ± 0.1 |
| passage 6 | C | − | 34.7 ± 0.3 | 11.7 ± 0.1 | 30.3 ± 0.2 |
| passage 6 | K | + | 16.7 ± 0.4 | 10.9 ± 0.1 | 29.7 ± 0.4 |
| passage 6 | L | + | 17.7 ± 0.2 | 11.8 ± 0.1 | 30.1 ± 0.4 |
| passage 6 | M | + | 17.5 ± 0.3 | 12.1 ± 0.1 | 30.3 ± 0.1 |
| passage 9 | C | − | 35.2 ± 0.8 | 12.0 ± 0.1 | 29.1 ± 0.4 |
| passage 9 | K | + | 17.7 ± 0.1 | 11.4 ± 0.1 | 29.5 ± 0.2 |
| passage 9 | L | + | 18.1 ± 0.2 | 11.9 ± 0.1 | 29.5 ± 0.2 |
| passage 9 | M | + | 17.7 ± 0.1 | 11.5 ± 0.1 | 29.8 ± 0.1 |
| passage 12 | C | − | 35.3 ± 0.3 | 13.6 ± 0.1 | 32.7 ± 0.2 |
| passage 12 | K | + | 18.6 ± 0.2 | 11.4 ± 0.3 | 30.6 ± 0.1 |
| passage 12 | L | + | 17.3 ± 0.2 | 10.1 ± 0.1 | 29.7 ± 0.4 |
| passage 12 | M | + | 17.6 ± 0.1 | 10.6 ± 0.1 | 30.0 ± 0.4 |
| Media only | | − | >40 | 37 ± 1 | 30.6 ± 0.9 |
| 80 ng MS2 RNA | | − | 39.6 ± 0.2 | 35.2 ± 0.6 | 11.6 ± 0.1 |
| NTC (no template | | | >40 | 37 ± 2.1 | 36.9 ± 0.3 |
| Ctrl) | | | | | |
| 293T pool, −RT | | + | 24.7 ± 0.2 | 21.3 ± 0.2 | 34 ± 1 |
| P3 pool, −RT | CKLM | + | 29.2 ± 0.2 | 24.9 ± 0.1 | 34 ± 1.6 |
| P6 pool, −RT | CKLM | + | 30.1 ± 0.3 | 24.8 ± 0.3 | 35.8 ± 0.9 |
| P9 pool, −RT | CKLM | + | 31.2 ± 0.1 | 25.1 ± 0.4 | 35.6 ± 0.3 |
| P12 pool, −RT | CKLM | + | 31.2 ± 0.5 | 24.3 ± 0.1 | 35.9 ± 0.3 |

[0380] HIV pol was detected in the cultures containing WT virus, but was only detectable at background levels in media obtained from uninfected MT-4 cells. BC was detectable in supernatant from cultures containing the deletion library (KLM), but only at background levels in the WT only culture (C). In samples where reverse transcriptase was not added, (-RT), levels of barcode cassette and pol were >10 C_{q} above the +RT controls, indicating that DNA contamination was negligible (RNA predominates by ≈1000× over cDNA). Without intending to be bound by any particular theory, the source of DNA is likely cell fragments and membrane blebs from dying cells. Contamination may also be due to reverse transcription products from intravirion reverse transcription, a phenomenon observed in retroviruses. As levels of DNA were low compared to RNA, additional DNAsel treatment was not performed before downstream processing.

[0381] Throughout the passage, levels of BC and POL remained relatively constant from passage to passage and between the three triplicate flasks (K/L/M). Thus the barcoded deletion mutants were stably maintained. No differences in total HIV copy number from flasks with and without the NL4-3Δ₁ library were observed, indicating no significant amounts of aggregated interference from mutants lacking pol.

[0382] Intracellular RNA was also isolated from 293T cells that were transfected with pNL4-3 (WT HIV) and the pNL4-3Δ₁ deletion library and RT-qPCR was performed. Total RNA was isolated with TRI-Reagent, and a poly(A) fraction was obtained by annealing to paramagnetic poly-dT beads. The total RNA fraction contained a considerable amount of DNA (from transfection plasmids), but the poly(A) fractionation effectively removed most of this. The poly(A) fraction corresponds to poly(A) mRNA, which requires complete transcription. RT-qPCR results are listed in Table 2. As with the supernatant data in Table 1, BC was only detected when the deletion library was included, and BC and POL were not detectable in naïve 293T cells.

TABLE 2
HIV-1 qPCR data (transfection, intracellular)

| sample | Flask(s) | WT | Δ | barcode | HIV_pol | MS2 |
|---|---|---|---|---|---|---|
| total | naïve | − | − | 34.6 ± 0.7 | 29.9 ± 0.1 | 36.9 ± 0.2 |
| total | ABC | + | − | 34.6 ± 0.4 | 13.6 ± 0.1 | 37.6 ± 0.7 |
| total | KLM | + | + | 17.2 ± 0.3 | 14.0 ± 0.1 | 37.2 ± 0.2 |
| poly(A) | naïve | − | − | 33.6 ± 0.7 | 28.9 ± 0.4 | 35.7 ± 0.4 |
| poly(A) | ABC | + | − | 34.3 ± 0.5 | 14.9 ± 0.1 | 35.8 ± 0.2 |
| poly(A) | KLM | + | + | 18.1 ± 0.1 | 15.6 ± 0.2 | 37.2 ± 0.7 |
| total | pooled, -RT | + | + | 23.6 ± 0.5 | 19.8 ± 0.2 | 36.7 ± 0.6 |
| poly(A) | pooled, -RT | + | + | 30.4 ± 0.3 | 32.3 ± 0.9 | 36.0 ± 0.1 |
| MS2 | N/A | − | − | 36.1 ± 1.4 | 36.5 ± 0.5 | 28.4 ± 0.2 |
| NTC | N/A | − | − | >40 | 34 ± 5 | 37.0 ± 0.8 |

### EXAMPLE 7

### Preparation and Analysis of Barcode Data

[0383] This Example details a method of preparing sequencing libraries of barcode sequences and identifying cis- and trans-acting regions of viruses.

[0384] In order to function as an effective TIP, a viral mutant must retain all necessary cis-acting elements required for replication so that it may be complemented by the wildtype virus. In this example, the cis and trans-acting elements of HIV-1 are identified by genetic screen by serial, high-MOI passage of NL4-3 and the NL4-3Δ₁ deletion library prepared as described above.

[0385] In a high MOI infection, trans factors are provided by co-infection with replication-competent virus. Therefore, genome regions that can tolerate deletion (as measured by enrichment of specific barcodes) correspond to trans-acting elements while regions that are intolerant of deletion correspond to cis-acting elements. By passaging random deletion libraries of a virus under high MOI conditions, a practitioner can functionally characterize the collection of diverse deletion mutants in order to map cis-acting elements of HIV-1. Viral mutants which persist through multiple passages are either (a) replication-competent or (b) able to be trans-complemented by the wildtype virus.

[0386] Two technical considerations should be considered when planning the experiment. To achieve efficient trans-complementation, cells should be infected at a high MOI, so that on average, each cell is infected with more than one virus, and preferably at least one copy of the wildtype virus to supply trans factors. For MOI >5, the majority of cells should receive at least one copy of the wildtype genome to supply the missing trans factors.

[0387] For the second consideration, undersampling of the library can prevent acquisition of meaningful data from the experiment. Thus, to keep strong selective pressure and to avoid drift, the diversity of the library should be limited to be fewer than the number of infected cells, so that most of the library will be sampled multiple times during infection.

[0388] In this example, the passaging was performed with 3 biological replicates (flasks K, L, M) that were seeded from a common pool of virus. Thus, mutants which are reliably enriched in all three flasks can be identified as retaining all cis-acting elements with high confidence. A parallel control was also developed, where only the wildtype virus would be introduced (flasks A, B, C). In this wildtype only arm (flasks A,B,C), no tagged deletion mutants (barcode cassette) are expected to be observed. The experiment is diagrammed in FIG. 24.

### Materials and Methods

### Preparation of Barcode Sequencing Libraries

[0389] Illumina sequencing libraries were prepared by a method as detailed in FIG. 23. Barcode cassettes were amplified from cDNA from above using a minimum number of cycles (typically 12-18) to prevent overamplification (post log-phase PCR) as evidenced by the RT-qPCR data from above. Illumina adaptors were added by two rounds of PCR (5 cycles each), to add phasing adaptors, random barcodes, and multiplexing barcodes. Sublibraries were size-selected on 5% TBE polyacrylamide gels and pooled for sequencing.

[0390] 20-30 sublibraries were sequenced on two lanes of a HiSeq4000 (Illumina) (spiked with 25% PhiX), using a single 1×50 b reads.

[0391] Barcodes were tallied using custom Python software and matched to deletion loci using the lookup table prepared previously to calculate deletion depth.

### Robustness of Barcode Passage

[0392] Using the C_{q} values of barcode cassettes measured by RT-qPCR in Example 6 (cf. Tables 1 and 2), Illumina sequencing libraries were prepared to characterize which barcodes were persisted throughout the high MOI passage. Barcode cassettes were amplified exponentially for a minimum number of cycles, and then multiplexing indices and Illumina TruSeq adapters were added by two additional rounds of PCR. From RT-qPCR, it was established that the number of template molecules for each PCR reaction was >10⁷. Using the barcode-to-deletion mapping for the 23,851 mappable mutants in pNL4-3Δ₁, the count of each barcode cassette (with a known deletion locus), was tabulated, and used to compute the prevalence, fₜ of each barcode cassette i in each sample.

Identification of Cis-Acting Elements through High MOI Passage

[0393] The pool of NL4-3Δ₁ deletion mutants was passaged 12 times at high multiplicity-of-infection (MOI) in a permissive T-cell line, MT-4. Samples were collected every 3 passages and deletion depth profiles built by deep sequencing of the barcoded deletion mutants.

### Results

[0394] Robustness of Barcode Passage

[0395] Pairwise correlation plots of all barcodes in triplicate flasks (K,L,M) at passage 3 and passage 12 are plotted in FIG. 28. Coefficients of determination (R²) at early timepoints (passage 3) were on average greater than at passage 12 (R²≅0.93) and at later timepoints dipped slightly to (R²≅0.83). Thus, there was strong concordance between the triplicate infections at each stage of passage scheme. Thus, the selection scheme is robust. Knowledge that a particular barcode is enriched in one replicate provides confidence that the same barcode will be reliably enriched in the other replicate flasks. For most barcodes, knowledge of barcode prevalence in one flask is predictive of the prevalence in other flasks.

### Identification of Deleterious and Adaptive Mutations

[0396] During high MOI passage, two phenotypes of deletion mutants that persist throughout passage are selected. Persistent mutants are either replication-competent (are self-mobilized) or are replication-defective but can be efficiently trans-complemented by the wildtype virus.

[0397] Using deep sequencing, the prevalence of each mutant in the total population of barcoded mutants was tabulated, and c prevalence trajectories computed throughout the passage. If a particular mutation becomes more prevalent over time, it is adaptive: it confers a fitness advantage (fitness is greater than average fitness at that point). If a particular mutant or mutation becomes less prevalent, then the mutation is deleterious (fitness decrease relative to average fitness). If prevalence remains constant, then the mutation is neutral. Once a mutant falls below a prevalence of 1/N where N is the population size (10⁵ to 10⁶ in this experiment), it is likely to be lost due to drift . This corresponds to log₁₀(prevalence) of −5.0 to −6.0.

[0398] Of the 23,851 mappable NL4-3 deletion mutants, only 4390 (18%) were extant in all three replicate flasks by passage 12—the remaining 19,461 (82%) were extinct in at least one of the three replicates.

[0399] Prevalence trajectories were computed for these 4390 extant mutations and the slope in prevalence was calculated versus passage number by linear regression, as shown in FIG. 29. After fitting linear regression lines to these 4390 mutants, it was observed that 1390 (32%) increased in prevalence through every passage, indicating that deletion mutants harboring these deletions were transmitting better than the average member of the barcoded population (FIG. 30). The remaining 3000 mutants remained steady or decreased in prevalence through every passage. As barcode levels were relative constant in comparison to total HIV POL (as shown previously in RT-qPCR data), it is clear that these 1390 deletions mutants were transmissible and could spread through the population as fast or faster than the wildtype virus. Thus, these 1390 deletions represent a potential collection of deletion mutants that are transmissible (R₀>1) under these conditions of high MOI passage in MT-4 as they are expanding in the population.

### Identification of Cis-Acting and Trans-Acting Elements

[0400] Using deep sequencing counts of each barcode cassette (vector c) and the barcode-to-genotype mapping prepared in Example 3 (genotype matrix M), a deletion depth profile for the HIV-1 genome at each timepoint using the formula (d=Mc, described in Example 3) was computed. Regions where the deletion depth is large correspond to genomic intervals that are tolerant to deletion (trans-acting elements encoding common goods). Intervals where the deletion depth is low or tends to 0 correspond to cis-acting elements, and cannot be complemented in trans. Deletion depth is presented in terms of raw units (unnormalized), and depends on the sequencing depth of each library.

[0401] As a baseline, the deletion depth profile of the pNL4-3Δ₁ deletion library across the pNL4-3 provirus was computed, shown in FIG. 31.The deletion depth across the genome is nonzero and flat across 0-4 kbp before rising to a peak centered at the N-terminus of env, and falling towards the 3′ end of the genome. Bias in deletion depth at this stage corresponds to differences in growth rate in the E. coli host harboring each plasmid. Faster growing bacteria will cause their harbored plasmid to be overrepresented in the library. The signal peptide of env and sequences at the N-terminus are known to be toxic to bacteria, therefore bacteria harboring env deletion mutant plasmids are likely to outgrow bacteria harboring plasmids that retain env.

### Cis-Acting Elements Required for Transcription

[0402] The poly(A) fraction of RNA isolated from 293T co-transfected with the pNL4-3Δ₁ deletion library and pNL4-3 represents mRNA. Barcodes found in this fraction represent genomes that have been successfully transcribed from the HIV-1 provirus. Areas of low deletion depth (compared to the plasmid library profile) correspond to cis-acting elements required for transcription in 293T. A deletion depth profile for this poly(A) RNA fraction is shown in FIG. 32.

[0403] The deletion depth profile of the poly(A) fraction has the same basic profile as the plasmid deletion library with two notable differences. Deletions at the 5′ end of the genome (spanning the 5′ LTR through SL1-SL4) strongly inhibit transcription, as reflected by the low deletion depth. These regions encode the LTR promoter and regions necessary for splicing and efficient transcription (TAR loop). At the 3′ end of the genome, there is a decrease in deletion depth after the RRE, falling towards the 3′ LTR with respect to the plasmid deletion library profile in FIG. 31. cis-acting elements required for encapsidation and egress

[0404] A deletion depth profile of RNAs that were present in the virus-containing fraction of supernatant from transfected 293T was computed next. Barcodes found in this fraction have tagged viral genomes that could be transcribed, exported from the nucleus, and packaged into virions (encapsidated), and exported from the cell (egressed). As shown in FIG. 33, the deletion depth profile is strikingly different from the transcription of plasmid library profiles, and shows two key areas of low deletion depth, which correspond to cis-acting elements that are required for transcription and encapsidation. At the 5′ end of the genome, there is an area of zero deletion depth that begins at the 5′ LTR and continues through the 5′ UTR, (SL1,SL2,SL3,SL4) to the start codon of gag. This region is often referred to as LP, the lentiviral packaging element, and is present in many lentiviral vectors. Structural studies have identified this region to be a minimal packaging element.

[0405] At the 3′ end of the genome, there is a region of zero deletion depth that maps exactly to the Rev Responsive Element (RRE), a region of secondary structure that binds HIV-1 Rev to export incompletely spliced RNAs from the nucleus via the Crm1 pathway. The RRE is important for the steps of nuclear export and encapsidation, but this experiment cannot differentiate between nuclear export or encapsidation as the potential block, as nuclear/cytoplasmic fractionation of RNAs was not performed.

[0406] These two regions (5′ LTR/UTR and RRE) appear to be the only elements required for transcription and encapsidation of the viral genome - all other genome intervals can tolerate some amount of deletion. This is in contrast to literature reports of the GRPE (a region at the frameshift of gag/ pol, that is putatively necessary for genome encapsidation (Chamanian, M. et al. Cell Host & Microbe, 13, 181-92 (2013)). It is however, consistent with a model of Gag binding to ψ and the RRE of HIV-1 (Kutluay, S. B. & Bieniasz, P. D. PLoS Pathogens, 6, e1001200 (2010); Kutluay, S. B. et al. Cell 159, 1096-1109 (2014)).

Identification of Cis-Acting Elements through High MOI Passage

[0407] Deletion depth profiles at passage 3, passage 6, and passage 12 are shown in FIG. 34, FIG. 35, and FIG. 36. At passage 3, the deletion depth profile plotted in FIG. 34 diverges notably from the 293T supernatant profile (FIG. 33). There are three key differences: (1) a valley that appears with a minimum centered above the cPPT/CTS (2) a shift of the region of zero-deletion depth at the 5′ end of the genome, which now encompasses the 5′ LTR, 3′ UTR, and the first three hundred bases of gag, (3) a widening and 3′ shift of the valley situated above the RRE.

[0408] After 6 in vitro passages (FIG. 35), these features become more pronounced where each valley flattens to a deletion depth of zero. The 5′ shoulder of the peak situated above env also appears to increase in height.

[0409] After 12 high MOI in vitro passages (FIG. 36), areas of low deletion depth (indicating intolerance to deletion) have flattened and reached a deletion depth of approximately zero. This actual deletion depth is non-zero (values of 10-300), and without intending to be bound by any particular theory, could reflect cross-talk between libraries during demultiplexing on the IIlumina platform in addition to persistent mutants.

[0410] Using these data, a model for the cis- and trans-acting elements of HIV-1 was constructed in FIG. 37. Three regions of the HIV-1 genome are tolerant to deletion, indicating that they encode elements that can be complemented efficiently in trans. The deletion depth profile at passage 12 is annotated in FIG. 37.

[0411] This model shows trans-acting element “mountains” and one trans-acting “hill”, with peaks at the center of pol (trans-acting element 1: TAE1), in the accessory gene tract of HIV (vif-vpu) (TAE2), and in the 3′ end of env. The deletion depth profile in TAE1 (gag-pol) has a small shoulder and an inflection point corresponding to the start codon of pol. The deletion depth profile of TAE2 (post cPPT to pre-RRE) has a shoulder corresponding to the start codon of env. The last trans-acting element (TAE3) begins after splice acceptor 7 (SA7) which marks the second exon of tat and rev, and ends at the PPT. The last hill after TAE3 (within the U3 region of the 3′ LTR) may be an artifact due to the mechanism of HIV-1 genome replication, where the U3 region of the 3′ LTR is copied to the 5′ end of the DNA genome during reverse transcription. Thus, mutants with apparent deletions in U3 may persist

[0412] The deletion depth profile after passage 12 also contains four regions of low or zero deletion depth, indicating that these genomic regions cannot tolerate deletion and cannot be complemented efficiently in trans: these regions are putative cis-acting elements (CAE).

[0413] CAE1 is 1115 bp in length and maps to nucleotides 1-1114 of NL4-3 proviral genome. This 5′ end of genome encompasses the 5′ LTR, stem loops 1-4, and the first 325 b of gag, which maps to the Gag MA (p17). This region is included in lentiviral vectors and a minimal packaging element, ψ, has been mapped to this region. Why deletions in Gag MA are not tolerated remains unknown, although others have speculated that there is a relationship between encapsidation and translation of the HIV-1 genome.

[0414] CAE2 is 126 bp in length and maps to nucleotides 4779-4905 of NL4-3, at the 3′ end of env. This region maps exactly to the cPPT/CTS, a region previously identified as being necessary for reverse-transcription and integration of HIV-1. This region is conserved in lentiviruses but not retroviruses.

[0415] CAE3 is 671 bp in length and maps to nucleotides 7710-8381 of NL4-3, at the 3′ end of env. It begins exactly at the RRE, and ends precisely at splice acceptor 7 (SA7). This splice acceptor is used for splicing of several multiply spliced HIV-1 transcripts, including (vpr, tat, rev, net). This region, too, is included in many lentiviral vectors.

[0416] CAE4 is 684 bp in length and maps to nucleotides 9025-9709 of NL4-3. This region spans the PPT, necessary for reverse transcription in HIV-1 and the 3′ LTR.

### Cis-Acting Elements of HIV-1

[0417] Example 6 and Example 7, when taken together, provide an approach to conducting a genetic screen to map the cis- and trans-acting elements of HIV-1 as well as many other viruses. In the screen, 293T cells were transfected with the NL4-3Δ₁ barcoded deletion library and wildtype NL4-3 to produce a pool of infectious virus. The virus pool was then passaged 12 times at high MOI (5-20) in a T-cell line (MT-4).

[0418] During high MOI infection, target cells are infected with more than one virus with high probability, allowing replication-defective viruses that retain all necessary cis-acting elements to persist through the passage by trans-complementation with common goods produced by functional wildtype virus. Thus, this screen selects two viral phenotypes: (a) replication-competent viruses (b) replication-defective viruses that retain all necessary cis-acting elements and can be mobilized effectively by wildtype HIV-1.

[0419] Sequencing of the barcodes at critical points in the infection cycle (transcription, encapsidation/egress, passage 3, passage 6, passage 12) and referencing the barcode/deletion lookup table allowed for the identification of genomic regions where deletions were tolerated in each step of the HIV-1 replication cycle (trans-acting elements) or were intolerant to deletion (cis-acting elements).

[0420] Using the high-resolution deletion depth profiles, four distinct cis-acting elements were identified, regions that that could not be complemented in trans. These regions are annotated in FIG. 37 : CAE1: nt 1-1144 of NL4-3, spanning the 5′ LTR, stem loops 1-4, and the first 325 b of gag; CAE2: nt 4779-4905 of NL4-3, the cPPT/CTS; CAE3: nt 7710-8381 of NL4-3, which begins exactly at the RRE and ends precisely at splice acceptor 7 (SA7); CAE4: nt 9025-9709 of NL4-3, which covers the PPT and the 3′ LTR.

[0421] Based upon these results, a minimal HIV-1 therapeutic interfering particle (in proviral form) might be obtained by concatenation of the sequences of CAE1 (1115 bp), CAE2 (126 bp), CAE3 (671 bp), and CAE4 (684 bp), which sum to a total length of 2596 bp. This assumes that the regions can act independently and the multiple deletions do not demonstrate epistasis.

[0422] Despite previous claims that the GRPE is important for encapsidation (Chamanian, M. et al. Cell Host & Microbe, 13, 181-92 (2013)) we show that deletions of this region do not affect mobilization, in agreement with Nikolaitchik and Hu (Nikolaitchik, O. A. & Hu, W.-S. J. Virology 88, 4040-4046 (2014)).

[0423] The screen was conducted using a single molecular clone of HIV-1 and a single clonal cell line. It is possible that cis-acting elements can vary between viral strains and between cell lines and tissue types.

[0424] Recombination between viruses was unmonitored, although it is known to be an important aspect for HIV-1 replication. Recombination can produce viral strains that have acquired more than one deletion, and create linkage effects. Additional sequencing outside of the barcode cassette region was not performed and the appearance of additional mutations was not examined. However, the dot plots in FIG. 28, show strong correlation between replicates, showing that the observed selection was deterministic, not in the region of drift.

### EXAMPLE 8

### Low-MOI Screen of an HIV-1 Random Deletion Library (Prophetic)

[0425] In a more stringent screen, the HIV-1 deletion library, pNL4-3Δ₁, could be passaged in permissive cells at low MOI (MOI of <1), instead of high MOI as performed in this chapter. An example scheme is depicted in FIG. 38.

[0426] Target cells are transduced/infected at low MOI with a pool of virus containing tagged deletion mutants and wildtype helper virus, and then allowed to recover in the presence of a drug (or neutralizing antibody) to restrict viral replication to a single round. During the recovery period, cells infected with wildtype virus or cytopathic deletion mutants will be killed, while uninfected cells and cells infected with non-cytopathic deletion mutants will survive. After the recovery period, the population of cells is infected at high MOI with the wildtype virus to mobilize deletion mutants. In this fashion, deletion mutants which do not kill their host cell but also retain all cis-acting elements required for transmission can be selected.

[0427] The low MOI screen is more stringent than a high MOI screen performed above, as it selects for mutants that are non-cytopathic but can be mobilized. The high MOI screen selects for mutants that are replication-competent or can be mobilized by the wildtype virus, but does not select for or against cell killing. Successive passages (every 24 hours), are performed before cell death occurs in HIV-1 infections, typically 24-72 hours post-infection (Perelson, A. S. & Nelson, P. W. SIAM Review, 41, 3-44 (1999).

### EXAMPLE 9

### Construction and Evaluation of Prototype DIPs for HIV-1

[0428] This Example describes how viral strains harboring multiple adaptive deletions can be recovered from data obtained during a high-MOI or low-MOI screen of a random deletion library.

[0429] An ideal transmissible antiviral (a DIP/TIP) would possess the following qualities: (1) it would compete effectively for common goods provided by the wildtype helper virus during co-infection (interference) (2) it would be retain all necessary cis-acting elements required for efficient mobilization by the helper virus (mobilization, R₀>1), (3) it would be unable to transmit without co-infection with wildtype helper virus (no self-replication).

[0430] The results of the high MOI passage screen for HIV-1 cis-acting elements in Examples 6 and 7 can be used to develop transmissible antivirals against HIV-1. From the deletion depth profile, we were able to identify four cis-acting elements that were intolerant of deletion and could not be complemented in trans. Therefore, any HIV-1 potential transmissible antiviral must retain these regions in its genome. Concatenation of these four cis-acting elements provides the minimum proviral size of an HIV-1 transmissible antiviral, about 2.6 kbp.

[0431] The high MOI passage of the pNL4-3Δ₁ deletion library also allowed an estimation of the fitness effect of each deletion (see FIG. 29 and FIG. 30). While most of the 23,851 deletions were deleterious (about 95%), 1390 mutants consistently increased in prevalence within the barcoded pool, suggesting these mutations had an adaptive effect (increase in R₀). A subset of the adaptive mutations increased in prevalence by as much as 1-2 logo over 12 passages.

[0432] By generating viral mutants harboring one or multiple adaptive deletions, as identified in the high MOI screen, it may be possible to assemble a library of potential TIPs. Such viruses can be further optimized by point mutations and further deletion.

[0433] In this Example, a collection of 60 HIV-1 subgenomic deletion mutants are reconstituted from adaptive deletions identified from the high MOI screen in Example 6 and Example 7. A subset of these satisfy the basic requirements of a transmissible antiviral in single-round replication studies: they interfere with HIV-1 replication, reducing wildtype viral loads; they can be mobilized by the wildtype helper virus to new cells, and they do not self-replicate.

### Materials and Methods

### Cloning Strategy

[0434] The high MOI screen in Example 6 and Example 7 identified three trans-acting elements of the HIV-1 genome that were tolerant to deletion (FIG. 37). The three trans-acting elements are interleaved by four cis-acting elements that are intolerant to deletion. This genome organization can be exploited during cloning of multiply-deleted strains. As the cis-acting elements must be preserved, they can be used as fixed sequence “fasteners” to join variably-sized pieces of the trans-acting elements.

[0435] To develop a modular cloning strategy, the 9709 bp proviral genome was subdivided into 7 blocks (A, B, C, D, E, F, G) that can be joined by Gibson Assembly to create a single provirus (FIG. 39). Each block is comprised of a 400-2100 bp subsequence of pNL4-3 plasmid with flanking adapter sequences to allow assembly of full-length virus genomes by Gibson Assembly via flanking 40 bp sequences, as depicted in FIG. 39. By creating different version of blocks A through G, one can create a combinatorial library by building mutants composed of different versions of each common block to generate multiply deleted and mutated strains of HIV-1.

[0436] Using the high MOI data results, a number of deletions that were reliably enriched (4-250×) over 12 in vitro passages in all three replicates of the HIV-1 high MOI passage experiment were selected for cloning (FIG. 40 and FIG. 41). Additionally, each of the four cis-acting elements is encoded by a single block (see FIG. 39 and FIG. 41). In all, 7 mutants were selected from block B, 1 mutant from block C, 4 from block D, and 1 from block F. When combined with the wildtype piece from each block, a total of 160 viruses (159 mutants and 1 wildtype virus) can be created.

[0437] Table 3 below lists the 20 single block sequences that can be joined to generate the multiply-deleted strains of HIV-1. The sequences are provided in the attached sequence listing as SEQ ID NOs: 24-43. For each sequence, Table 3 provides a description of what deletion was made (if any) in the sequence. All numbering is with respect to the 9709 bp NL4-3 HIV-1 proviral sequence.

TABLE 3

| | | | | | | partially | SEQ |
|---|---|---|---|---|---|---|---|
| | | | | | | or fully | ID |
| name | description | Δ (bp) | left | right | barcode | deleted genes | NO. |
| NL43_A00 | HIV-1 | 0 | NA | NA | NA | None | 24 |
| | subsequence | | | | | | |
| | A, WT | | | | | | |
| NL43_B00 | HIV-1 | NA | NA | NA | NA | None | 25 |
| | subsequence | | | | | | |
| | B, WT | | | | | | |
| NL43_B01 | HIV-1 | 1016 | 1636 | 2651 | TTGAACCCATGGCCGG | gag/pol | 26 |
| | subsequence | | | | ATCA (SEQ ID NO: 44) | | |
| | B, Δ | | | | | | |
| NL43_B02 | HIV-1 | 1361 | 1455 | 2815 | TGGACCCGCCCGGACG | gag/pol | 27 |
| | subsequence | | | | CTCA (SEQ ID NO: 45) | | |
| | B, Δ | | | | | | |
| NL43_B03 | HIV-1 | 1547 | 1448 | 2994 | CAGGCAGCTCAAGAAA | gag/pol | 28 |
| | subsequence | | | | CACG (SEQ ID NO: 46) | | |
| | B, Δ | | | | | | |
| NL43_B04 | HIV-1 | 908 | 1469 | 2376 | TCGACAGTGTAATGTCT | gag/pol | 29 |
| | subsequence | | | | GCA (SEQ ID NO: 47) | | |
| | B, Δ | | | | | | |
| NL43_B05 | HIV-1 | 825 | 1484 | 2308 | GGGGGGCGGCGATTAC | gag/pol | 30 |
| | subsequence | | | | TTGT (SEQ ID NO: 48) | | |
| | B, Δ | | | | | | |
| NL43_B06 | HIV-1 | 860 | 1469 | 2328 | GAGCTGCAGGGCATGT | gag/pol | 31 |
| | subsequence | | | | TATA (SEQ ID NO: 49) | | |
| | B, Δ | | | | | | |
| NL43_B07 | HIV-1 | 796 | 1560 | 2355 | GGCGACCCTCGGCCGT | gag/pol | 32 |
| | subsequence | | | | GGAC (SEQ ID NO: 50) | | |
| | B, Δ | | | | | | |
| NL43_C00 | HIV-1 | 0 | NA | NA | NA | None | 33 |
| | subsequence | | | | | | |
| | C, WT | | | | | | |
| NL43_C01 | HIV-1 | 987 | 3620 | 4606 | CAGCTTGTTCAGATGCT | Pol | 34 |
| | subsequence | | | | GTA (SEQ ID NO: 51) | | |
| | C, Δ | | | | | | |
| NL43_D00 | HIV-1 | 0 | NA | NA | NA | None | 35 |
| | subsequence | | | | | | |
| | D, WT | | | | | | |
| NL43_D01 | HIV-1 | 986 | 5073 | 6058 | TCTTGAACAGCGCGGTC | vif/vpr/tat/ | 36 |
| | subsequence | | | | TGT (SEQ ID NO: 52) | rev | |
| | D, Δ | | | | | | |
| NL43_D02 | HIV-1 | 986 | 5073 | 6058 | D01 but without | vif/vpr/tat/ | 37 |
| | subsequence | | | | barcode | rev | |
| | D, Δ | | | | | | |
| NL43_D03 | HIV-1 | 1089 | 5071 | 6159 | GATCGGTCGTCGCAGC | vif/vpr/tat/ | 38 |
| | subsequence | | | | GGTC (SEQ ID NO: 53) | rev/vpu | |
| | D, Δ | | | | | | |
| NL43_D04 | HIV-1 | 1211 | 5041 | 6251 | TATCTGTAGCCAACATT | vif/vpr/tat/ | 39 |
| | subsequence | | | | CGA (SEQ ID NO: 54) | rev/vpu/env | |
| | D, Δ | | | | | | |
| NL43_E00 | HIV-1 | 0 | NA | NA | NA | None | 40 |
| | subsequence | | | | | | |
| | E, WT | | | | | | |
| NL43_F00 | HIV-1 | 0 | NA | NA | NA | NA | 41 |
| | subsequence | | | | | | |
| | F, WT | | | | | | |
| NL43_F01 | HIV-1 | 174 | 9116 | 9289 | CGTAAAGTGGGATAGTT | nef/U3 | 42 |
| | subsequence | | | | TTT (SEQ ID NO: 55) | | |
| | F, Δ | | | | | | |
| NL43_G00 | HIV-1 | 0 | NA | NA | NA | None | 43 |
| | subsequence | | | | | | |
| | G, Δ | | | | | | |

[0438] The following system is used to describe the genotype of each virus. For each block, “00” is the wildtype version, thus the wildtype version of NL4-3 can be written descriptively (yet verbosely) as NL43_A00B00C00D00E00F00G00. A mutant which is composed of mutant blocks B02, D01 and wildtype versions of the remaining blocks has the genotype of NL43_A00B02C00D01E00F01.

[0439] Using this combinatorial strategy, 61 viruses (60 deletion mutants and 1 wildtype virus) were prepared using the assembly strategy demonstrated in FIG. 39. A complete listing of the deletion mutants can be found in Tables 4 and 5 below. The hiv00 sequence corresponds to the 9709 bp NL4-3 provirus referred to herein. All numbering is done relative to this sequence. The publicly-available sequence is deposited in GenBank under accession number AF324493.2. The 9709 bp NL4-3 provirus corresponds to nt 1-9709 of this sequence.

TABLE 4

| | | total | | | | SEQ |
|---|---|---|---|---|---|---|
| | | bases | deletion | genes/regions partially or fully | | ID |
| seq | name | deleted | inteval(s) | deleted | notes | NO. |
| hiv00 | NL43_A00B00C00D00E00F00G00 | 0 | none | none | WT | 56 |
| hiv01 | NL43_A00B00C00D00E00F01G00 | 174 | 9116- | nef/U3 | Δnef | 57 |
| | | | 9289 | | | |
| hiv02 | NL43_A00B00C00D01E00F00G00 | 986 | 5073- | vif/vpr/tat/rev | | 58 |
| | | | 6058 | | | |
| hiv03 | NL43_A00B00C00D01E00F01G00 | 1160 | 5073- | vif/vpr/tat/rev/nef/U3 | | 59 |
| | | | 6058, | | | |
| | | | 9116- | | | |
| | | | 9289 | | | |
| hiv04 | NL43_A00B00C00D02E00F00G00 | 986 | 5073- | vif/vpr/tat/rev | | |
| | | | 6058 | | | |
| hiv05 | NL43_A00B00C00D02E00F01G00 | 1160 | 5073- | vif/vpr/tat/rev/nef/U3 | | 61 |
| | | | 6058, | | | |
| | | | 9116- | | | |
| | | | 9289 | | | |
| hiv06 | NL43_A00B00C00D03E00F00G00 | 1089 | 5071- | vif/vpr/tat/rev/vpu | | 62 |
| | | | 6159 | | | |
| hiv07 | NL43_A00B00C00D03E00F01G00 | 1263 | 5071- | vif/vpr/tat/rev/vpu/nef/U3 | | 63 |
| | | | 6159, | | | |
| | | | 9116- | | | |
| | | | 9289 | | | |
| hiv08 | NL43_A00B00C00D04E00F00G00 | 1211 | 5041- | vif/vpr/tat/rev/vpu/env | | 64 |
| | | | 6251 | | | |
| hiv09 | NL43_A00B00C00D04E00F01G00 | 1385 | 5041- | vif/vpr/tat/rev/vpu/env/nef/U3 | | 65 |
| | | | 6251, | | | |
| | | | 9116- | | | |
| | | | 9289 | | | |
| hiv10 | NL43_A00B00C01D00E00F00G00 | 987 | 3620- | pol | | 66 |
| | | | 4606 | | | |
| hiv11 | NL43_A00B00C01D00E00F01G00 | 1161 | 3620- | pol/nef/U3 | | 67 |
| | | | 4606, | | | |
| | | | 9116- | | | |
| | | | 9289 | | | |
| hiv12 | NL43_A00B00C01D01E00F00G00 | 1973 | 3620- | pol/vif/vpr/tat/rev | | 68 |
| | | | 4606, | | | |
| | | | 5073- | | | |
| | | | 6058 | | | |
| hiv13 | NL43_A00B00C01D01E00F01G00 | 2147 | 3620- | pol/vif/vpr/tat/rev/nef/U3 | | 69 |
| | | | 4606, | | | |
| | | | 5073- | | | |
| | | | 6058, | | | |
| | | | 9116- | | | |
| | | | 9289 | | | |
| hiv14 | NL43_A00B00C01D02E00F00G00 | 1973 | 3620- | pol/vif/vpr/tat/rev | | 70 |
| | | | 4606, | | | |
| | | | 5073- | | | |
| | | | 6058 | | | |
| hiv15 | NL43_A00B00C01D02E00F01G00 | 2147 | 3620- | pol/vif/vpr/tat/rev/nef/U3 | | 71 |
| | | | 4606, | | | |
| | | | 5073- | | | |
| | | | 6058, | | | |
| | | | 9116- | | | |
| | | | 9289 | | | |
| hiv16 | NL43_A00B00C01D03E00F00G00 | 2076 | 3620- | pol/vif/vpr/tat/rev/vpu | | 72 |
| | | | 4606, | | | |
| | | | 5071- | | | |
| | | | 6159 | | | |
| hiv17 | NL43_A00B00C01D03E00F01G00 | 2250 | 3620- | pol/vif/vpr/tat/rev/vpu/nef/U3 | | 73 |
| | | | 4606, | | | |
| | | | 5071- | | | |
| | | | 6159, | | | |
| | | | 9116- | | | |
| | | | 9289 | | | |
| hiv18 | NL43_A00B00C01D04E00F00G00 | 2198 | 3620- | pol/vif/vpr/tat/rev/vpu/env | | 74 |
| | | | 4606, | | | |
| | | | 5041- | | | |
| | | | 6251 | | | |
| hiv19 | NL43_A00B00C01D04E00F01G00 | 2372 | 3620- | pol/vif/vpr/tat/rev/vpu/env/nef/U3 | | 75 |
| | | | 4606, | | | |
| | | | 5041- | | | |
| | | | 6251- | | | |
| | | | 9116- | | | |
| | | | 9289 | | | |
| hiv20 | NL43_A00B01C00D00E00F00G00 | 1016 | 1636- | gag/pol | | 76 |
| | | | 2651 | | | |
| hiv21 | NL43_A001301C00D01E00F00G00 | 2002 | 1636- | gag/pol/vif/vpr/tat/rev | | 77 |
| | | | 2651, | | | |
| | | | 5073- | | | |
| | | | 6058 | | | |
| hiv22 | NL43_A00B01C00D04E00F00G00 | 2227 | 1636- | gag/pol/vif/vpr/tat/rev/vpu/env | | 78 |
| | | | 2651, | | | |
| | | | 5041- | | | |
| | | | 6251 | | | |
| hiv23 | NL43_A001301C01D00E00F00G00 | 2003 | 1636- | gag/pol | | 79 |
| | | | 2651, | | | |
| | | | 3620- | | | |
| | | | 4606 | | | |
| hiv24 | NL43_A001301C01D01E00F00G00 | 2989 | 1636- | gag/pol/vif/vpr/tat/rev | | 80 |
| | | | 2651, | | | |
| | | | 3620- | | | |
| | | | 4606, | | | |
| | | | 5073- | | | |
| | | | 6058 | | | |
| hiv25 | NL43_A001301C01D04E00F00G00 | 3214 | 1636- | gag/pol/vif/vpr/tat/rev/vpu/env | | 81 |
| | | | 2651, | | | |
| | | | 3620- | | | |
| | | | 4606, | | | |
| | | | 5041- | | | |
| | | | 6251 | | | |
| hiv26 | NL43_A00B02C00D00E00F00G00 | 1361 | 1455- | gag/pol | | 82 |
| | | | 2815 | | | |
| hiv27 | NL43_A00B02C00D01E00F00G00 | 2347 | 1455- | gag/pol/vif/vpr/tat/rev | | 83 |
| | | | 2815, | | | |
| | | | 5073- | | | |
| | | | 6058 | | | |
| hiv28 | NL43_A00B02C00D04E00F00G00 | 2572 | 1455- | gag/pol/vif/vpr/tat/rev/vpu/env | | 84 |
| | | | 2815, | | | |
| | | | 5041- | | | |
| | | | 6251 | | | |
| hiv29 | NL43_A00B02C01D00E00F00G00 | 2348 | 1455- | gag/pol | | 85 |
| | | | 2815, | | | |
| | | | 3620- | | | |
| | | | 4606 | | | |
| hiv30 | NL43_A00B02C01D01E00F00G00 | 3334 | 1455- | gag/pol/vif/vpr/tat/rev | | 86 |
| | | | 2815, | | | |
| | | | 3620- | | | |
| | | | 4606, | | | |
| | | | 5073- | | | |
| | | | 6058 | | | |
| hiv31 | NL43_A00B02C01D04E00F00G00 | 3559 | 1455- | gag/pol/vif/vpr/tat/rev/vpu/env | | 87 |
| | | | 2815, | | | |
| | | | 3620- | | | |
| | | | 4606, | | | |
| | | | 5041- | | | |
| | | | 6251 | | | |
| hiv32 | NL43_A00B03C00D00E00F00G00 | 1547 | 1448- | gag/pol | | 88 |
| | | | 2994 | | | |
| hiv33 | NL43_A00B03C00D01E00F00G00 | 2533 | 1448- | gag/pol/vif/vpr/tat/rev | | 89 |
| | | | 2994, | | | |
| | | | 5073- | | | |
| | | | 6058 | | | |
| hiv34 | NL43_A00B03C00D04E00F00G00 | 2758 | 1448- | gag/pol/vif/vpr/tat/rev/vpu/env | | 90 |
| | | | 2994, | | | |
| | | | 5041- | | | |
| | | | 6251 | | | |
| hiv35 | NL43_A00B03C01D00E00F00G00 | 2534 | 1448- | gag/pol | | 91 |
| | | | 2994, | | | |
| | | | 3620- | | | |
| | | | 4606 | | | |
| hiv36 | NL43_A00B03C01D01E00F00G00 | 3520 | 1448- | gag/pol/vif/vpr/tat/rev | | 92 |
| | | | 2994, | | | |
| | | | 3620- | | | |
| | | | 4606, | | | |
| | | | 5073- | | | |
| | | | 6058 | | | |
| hiv37 | NL43_A00B03C01D04E00F00G00 | 3745 | 1448- | gag/pol/vif/vpr/tat/rev/vpu/env | | 93 |
| | | | 2994, | | | |
| | | | 3620- | | | |
| | | | 4606, | | | |
| | | | 5041- | | | |
| | | | 6251 | | | |
| hiv38 | NL43_A00B04C00D00E00F00G00 | 908 | 1469- | gag/pol | | 94 |
| | | | 2376 | | | |
| hiv39 | NL43_A00B04C00D01E00F00G00 | 1894 | 1469- | gag/pol/vif/vpr/tat/rev | | 95 |
| | | | 2376, | | | |
| | | | 5073- | | | |
| | | | 6058 | | | |
| hiv40 | NL43_A00B04C00D04E00F00G00 | 2119 | 1469- | gag/pol/vif/vpr/tat/rev/vpu/env | | 96 |
| | | | 2376, | | | |
| | | | 5041- | | | |
| | | | 6251 | | | |
| hiv41 | NL43_A00B04C01D00E00F00G00 | 1895 | 1469- | gag/pol | | 97 |
| | | | 2376, | | | |
| | | | 3620- | | | |
| | | | 4606 | | | |
| hiv42 | NL43_A00B04C01D01E00F00G00 | 2881 | 1469- | gag/pol/vif/vpr/tat/rev | | 98 |
| | | | 2376, | | | |
| | | | 3620- | | | |
| | | | 4606, | | | |
| | | | 5073- | | | |
| | | | 6058 | | | |
| hiv43 | NL43_A00B04C01D04E00F00G00 | 3106 | 1469- | gag/pol/vif/vpr/tat/rev/vpu/env | | 99 |
| | | | 2376, | | | |
| | | | 3620- | | | |
| | | | 4606, | | | |
| | | | 5041- | | | |
| | | | 6251 | | | |
| hiv44 | NL43_A00B05C00D00E00F00G00 | 825 | 1484- | gag/pol | | 100 |
| | | | 2308 | | | |
| hiv45 | NL43_A00B05C00D01E00F00G00 | 1811 | 1484- | gag/pol/vif/vpr/tat/rev | | 101 |
| | | | 2308, | | | |
| | | | 5073- | | | |
| | | | 6058 | | | |
| hiv46 | NL43_A00B05C00D04E00F00G00 | 2036 | 1484- | gag/pol/vif/vpr/tat/rev/vpu/env | | 102 |
| | | | 2308, | | | |
| | | | 5041- | | | |
| | | | 6251 | | | |
| hiv47 | NL43_A00B05C01D00E00F00G00 | 1812 | 1484- | gag/pol | | 103 |
| | | | 2308, | | | |
| | | | 3620- | | | |
| | | | 4606 | | | |
| hiv48 | NL43_A00B05C01D01E00F00G00 | 2798 | 1484- | gag/pol/vif/vpr/tat/rev | | 104 |
| | | | 2308, | | | |
| | | | 3620- | | | |
| | | | 4606, | | | |
| | | | 5073- | | | |
| | | | 6058 | | | |
| hiv49 | NL43_A00B05C01D04E00F00G00 | 3023 | 1484- | gag/pol/vif/vpr/tat/rev/vpu/env | | 105 |
| | | | 2308, | | | |
| | | | 3620- | | | |
| | | | 4606, | | | |
| | | | 5041- | | | |
| | | | 6251 | | | |
| hiv50 | NL43_A00B06C00D01E00F00G00 | 1846 | 1469- | gag/pol/vif/vpr/tat/rev | | 106 |
| | | | 2328, | | | |
| | | | 5073- | | | |
| | | | 6058 | | | |
| hiv51 | NL43_A00B06C00D04E00F00G00 | 2071 | 1469- | gag/pol/vif/vpr/tat/rev/vpu/env | | 107 |
| | | | 2328, | | | |
| | | | 5041- | | | |
| | | | 6251 | | | |
| hiv52 | NL43_A00B06C01D00E00F00G00 | 1847 | 1469- | gag/pol | | 108 |
| | | | 2328, | | | |
| | | | 3620- | | | |
| | | | 4606 | | | |
| hiv53 | NL43_A00B06C01D01E00F00G00 | 2833 | 1469- | gag/pol/vif/vpr/tat/rev | | 109 |
| | | | 2328, | | | |
| | | | 3620- | | | |
| | | | 4606, | | | |
| | | | 5073- | | | |
| | | | 6058 | | | |
| hiv54 | NL43_A00B06C01D04E00F00G00 | 3058 | 1469- | gag/pol/vif/vpr/tat/rev/vpu/env | | 110 |
| | | | 2328, | | | |
| | | | 3620- | | | |
| | | | 4606, | | | |
| | | | 5041- | | | |
| | | | 6251 | | | |
| hiv55 | NL43_A00B07C00D00E00F00G00 | 796 | 1560- | gag/pol | | 111 |
| | | | 2355 | | | |
| hiv56 | NL43_A00B07C00D01E00F00G00 | 1782 | 1560- | gag/pol/vif/vpr/tat/rev | | 112 |
| | | | 2355, | | | |
| | | | 5073- | | | |
| | | | 6058 | | | |
| hiv57 | NL43_A00B07C00D04E00F00G00 | 2007 | 1560- | gag/pol/vif/vpr/tat/rev/vpu/env | | 113 |
| | | | 2355, | | | |
| | | | 5041- | | | |
| | | | 6251 | | | |
| hiv58 | NL43_A00B07C01D00E00F00G00 | 1783 | 1560- | gag/pol | | 114 |
| | | | 2355, | | | |
| | | | 3620- | | | |
| | | | 4606 | | | |
| hiv59 | NL43_A00B07C01D01E00F00G00 | 2769 | 1560- | gag/pol/vif/vpr/tat/rev | | 115 |
| | | | 2355, | | | |
| | | | 3620- | | | |
| | | | 4606, | | | |
| | | | 5073- | | | |
| | | | 6058 | | | |
| hiv60 | NL43_A00B07C01D04E00F00G00 | 2994 | 1560- | gag/pol/vif/vpr/tat/rev/vpu/env | | 116 |
| | | | 2355, | | | |
| | | | 3620- | | | |
| | | | 4606, | | | |
| | | | 5041- | | | |
| | | | 6251 | | | |

TABLE 5

| | | | | total | | |
|---|---|---|---|---|---|---|
| | | | | bases | deletion | genes/regions partially or |
| strain | plasmid_name | seq | name | deleted | interval(s) | fully deleted |
| BTN400 | pUC19- | hiv20 | NL43_A00B01C | 1016 | 1636-2651 | gag/pol |
| | NL43_A00B01C00 | | 00D00E00F00G | | | |
| | D00E00F00G00 | | 00 | | | |
| BTN401 | pUC19- | hiv21 | NL43_A00B01C | 2002 | 1636-2651, | gag/pol/vif/vpr/tat/rev |
| | NL43_A00B01C00 | | 00D01E00F00G | | 5073-6058 | |
| | D01E00F00G00 | | 00 | | | |
| BTN402 | pUC19- | hiv22 | NL43_A00B01C | 2227 | 1636-2651, | gag/pol/vif/vpr/tat/rev/vpu/env |
| | NL43_A00B01C00 | | 00D04E00F00G | | 5041-6251 | |
| | D04E00F00G00 | | 00 | | | |
| BTN403 | pUC19- | hiv24 | NL43_A00B01C | 2989 | 1636-2651, | gag/pol/vif/vpr/tat/rev |
| | NL43_A00B01C01 | | 01D01E00F00G | | 3620-4606, | |
| | D01E00F00G00 | | 00 | | 5073-6058 | |
| BTN404 | pUC19- | hiv26 | NL43_A00B02C | 1361 | 1455-2815 | gag/pol |
| | NL43_A00B02C00 | | 00D00E00F00G | | | |
| | D00E00F00G00 | | 00 | | | |
| BTN405 | pUC19- | hiv27 | NL43_A00B02C | 2347 | 1455-2815, | gag/pol/vif/vpr/tat/rev |
| | NL43_A00B02C00 | | 00D01E00F00G | | 5073-6058 | |
| | D01E00F00G00 | | 00 | | | |
| BTN406 | pUC19- | hiv28 | NL43_A00B02C | 2572 | 1455-2815, | gag/pol/vif/vpr/tat/rev/vpu/env |
| | NL43_A00B02C00 | | 00D04E00F00G | | 5041-6251 | |
| | D04E00F00G00 | | 00 | | | |
| BTN407 | pUC19- | hiv29 | NL43_A00B02C | 2348 | 1455-2815, | gag/pol |
| | NL43_A00B02C01 | | 01D00E00F00G | | 3620-4606 | |
| | D00E00F00G00 | | 00 | | | |
| BTN408 | pUC19- | hiv30 | NL43_A00B02C | 3334 | 1455-2815, | gag/pol/vif/vpr/tat/rev |
| | NL43_A00B02C01 | | 01D01E00F00G | | 3620-4606, | |
| | D01E00F00G00 | | 00 | | 5073-6058 | |
| BTN409 | pUC19- | hiv31 | NL43_A00B02C | 3559 | 1455-2815, | gag/pol/vif/vpr/tat/rev/vpu/env |
| | NL43_A00B02C01 | | 01D04E00F00G | | 3620-4606, | |
| | D04E00F00G00 | | 00 | | 5041-6251 | |
| BTN410 | pUC19- | hiv33 | NL43_A00B03C | 2533 | 1448-2994, | gag/pol/vif/vpr/tat/rev |
| | NL43_A00B03C00 | | 00D01E00F00G | | 5073-6058 | |
| | D01E00F00G00 | | 00 | | | |
| BTN411 | pUC19- | hiv34 | NL43_A00B03C | 2758 | 1448-2994, | gag/pol/vif/vpr/tat/rev/vpu/env |
| | NL43_A00B03C00 | | 00D04E00F00G | | 5041-6251 | |
| | D04E00F00G00 | | 00 | | | |
| BTN412 | pUC19- | hiv38 | NL43_A00B04C | 908 | 1469-2376 | gag/pol |
| | NL43_A00B04C00 | | 00D00E00F00G | | | |
| | D00E00F00G00 | | 00 | | | |
| BTN413 | pUC19- | hiv39 | NL43_A00B04C | 1894 | 1469-2376, | gag/pol/vif/vpr/tat/rev |
| | NL43_A00B04C00 | | 00D01E00F00G | | 5073-6058 | |
| | D01E00F00G00 | | 00 | | | |
| BTN414 | pUC19- | hiv40 | NL43_A00B04C | 2119 | 1469-2376, | gag/pol/vif/vpr/tat/rev/vpu/env |
| | NL43_A00B04C00 | | 00D04E00F00G | | 5041-6251 | |
| | D04E00F00G00 | | 00 | | | |
| BTN415 | pUC19- | hiv41 | NL43_A00B04C | 1895 | 1469-2376, | gag/pol |
| | NL43_A00B04C01 | | 01D00E00F00G | | 3620-4606 | |
| | D00E00F00G00 | | 00 | | | |
| BTN416 | pUC19- | hiv42 | NL43_A00B04C | 2881 | 1469-2376, | gag/pol/vif/vpr/tat/rev |
| | NL43_A00B04C01 | | 01D01E00F00G | | 3620-4606, | |
| | D01E00F00G00 | | 00 | | 5073-6058 | |
| BTN417 | pUC19- | hiv43 | NL43_A00B04C | 3106 | 1469-2376, | gag/pol/vif/vpr/tat/rev/vpu/env |
| | NL43_A00B04C01 | | 01D04E00F00G | | 3620-4606, | |
| | D04E00F00G00 | | 00 | | 5041-6251 | |
| BTN418 | pUC19- | hiv44 | NL43_A00B05C | 825 | 1484-2308 | gag/pol |
| | NL43_A00B05C00 | | 00D00E00F00G | | | |
| | D00E00F00G00 | | 00 | | | |
| BTN419 | pUC19- | hiv45 | NL43_A00B05C | 1811 | 1484-2308, | gag/pol/vif/vpr/tat/rev |
| | NL43_A00B05C00 | | 00D01E00F00G | | 5073-6058 | |
| | D01E00F00G00 | | 00 | | | |
| BTN420 | pUC19- | hiv46 | NL43_A00B05C | 2036 | 1484-2308, | gag/pol/vif/vpr/tat/rev/vpu/env |
| | NL43_A00B05C00 | | 00D04E00F00G | | 5041-6251 | |
| | D04E00F00G00 | | 00 | | | |
| BTN421 | pUC19- | hiv47 | NL43_A00B05C | 1812 | 1484-2308, | gag/pol |
| | NL43_A00B05C01 | | 01D00E00F00G | | 3620-4606 | |
| | D00E00F00G00 | | 00 | | | |
| BTN422 | pUC19- | hiv48 | NL43_A00B05C | 2798 | 1484-2308, | gag/pol/vif/vpr/tat/rev |
| | NL43_A00B05C01 | | 01D01E00F00G | | 3620-4606, | |
| | D01E00F00G00 | | 00 | | 5073-6058 | |
| BTN423 | pUC19- | hiv49 | NL43_A00B05C | 3023 | 1484-2308, | gag/pol/vif/vpr/tat/rev/vpu/env |
| | NL43_A00B05C01 | | 01D04E00F00G | | 3620-4606, | |
| | D04E00F00G00 | | 00 | | 5041-6251 | |
| BTN424 | pUC19- | hiv50 | NL43_A00B06C | 1846 | 1469-2328, | gag/pol/vif/vpr/tat/rev |
| | NL43_A00B06C00 | | 00D01E00F00G | | 5073-6058 | |
| | D01E00F00G00 | | 00 | | | |
| BTN425 | pUC19- | hiv51 | NL43_A00B06C | 2071 | 1469-2328, | gag/pol/vif/vpr/tat/rev/vpu/env |
| | NL43_A00B06C00 | | 00D04E00F00G | | 5041-6251 | |
| | D04E00F00G00 | | 00 | | | |
| BTN426 | pUC19- | hiv53 | NL43_A00B06C | 2833 | 1469-2328, | gag/pol/vif/vpr/tat/rev |
| | NL43_A00B06C01 | | 01D01E00F00G | | 3620-4606, | |
| | D01E00F00G00 | | 00 | | 5073-6058 | |
| BTN427 | pUC19- | hiv54 | NL43_A00B06C | 3058 | 1469-2328, | gag/pol/vif/vpr/tat/rev/vpu/env |
| | NL43_A00B06C01 | | 01D04E00F00G | | 3620-4606, | |
| | D04E00F00G00 | | 00 | | 5041-6251 | |
| BTN428 | pUC19- | hiv55 | NL43_A00B07C | 796 | 1560-2355 | gag/pol |
| | NL43_A00B07C00 | | 00D00E00F00G | | | |
| | D00E00F00G00 | | 00 | | | |
| BTN429 | pUC19- | hiv56 | NL43_A00B07C | 1782 | 1560-2355, | gag/pol/vif/vpr/tat/rev |
| | NL43_A00B07C00 | | 00D01E00F00G | | 5073-6058 | |
| | D01E00F00G00 | | 00 | | | |
| BTN430 | pUC19- | hiv57 | NL43_A00B07C | 2007 | 1560-2355, | gag/pol/vif/vpr/tat/rev/vpu/env |
| | NL43_A00B07C00 | | 00D04E00F00G | | 5041-6251 | |
| | D04E00F00G00 | | 00 | | | |
| BTN431 | pUC19- | hiv58 | NL43_A00B07C | 1783 | 1560-2355, | gag/pol |
| | NL43_A00B07C01 | | 01D00E00F00G | | 3620-4606 | |
| | D00E00F00G00 | | 00 | | | |
| BTN432 | pUC19- | hiv59 | NL43_A00B07C | 2769 | 1560-2355, | gag/pol/vif/vpr/tat/rev |
| | NL43_A00B07C01 | | 01D01E00F00G | | 3620-4606, | |
| | D01E00F00G00 | | 00 | | 5073-6058 | |
| BTN433 | pUC19- | hiv60 | NL43_A00B07C | 2994 | 1560-2355, | gag/pol/vif/vpr/tat/rev/vpu/env |
| | NL43_A00B07C01 | | 01D04E00F00G | | 3620-4606, | |
| | D04E00F00G00 | | 00 | | 5041-6251 | |
| BTN434 | pUC19- | hiv23 | NL43_A00B01C | 2003 | 1636-2651, | gag/pol |
| | NL43_A001301C01 | | 01D00E00F00G | | 3620-4606 | |
| | D00E00F00G00 | | 00 | | | |
| BTN435 | pUC19- | hiv23 | NL43_A00B01C | 2003 | 1636-2651, | gag/pol |
| | NL43_A001301C01 | | 01D00E00F00G | | 3620-4606 | |
| | D00E00F00G00 | | 00 | | | |
| BTN436 | pUC19- | hiv25 | NL43_A00B01C | 3214 | 1636-2651, | gag/pol/vif/vpr/tat/rev/vpu/env |
| | NL43_A00B01C01 | | 01D04E00F00G | | 3620-4606, | |
| | D04E00F00G00 | | 00 | | 5041-6251 | |
| BTN437 | pUC19- | hiv25 | NL43_A00B01C | 3214 | 1636-2651, | gag/pol/vif/vpr/tat/rev/vpu/env |
| | NL43_A00B01C01 | | 01D04E00F00G | | 3620-4606, | |
| | D04E00F00G00 | | 00 | | 5041-6251 | |
| BTN438 | pUC19- | hiv32 | NL43_A00B03C | 1547 | 1448-2994 | gag/pol |
| | NL43_A00B03C00 | | 00D00E00F00G | | | |
| | D00E00F00G00 | | 00 | | | |
| BTN439 | pUC19- | hiv32 | NL43_A00B03C | 1547 | 1448-2994 | gag/pol |
| | NL43_A00B03C00 | | 00D00E00F00G | | | |
| | D00E00F00G00 | | 00 | | | |
| BTN440 | pUC19- | hiv35 | NL43_A00B03C | 2534 | 1448-2994, | gag/pol |
| | NL43_A00B03C01 | | 01D00E00F00G | | 3620-4606 | |
| | D00E00F00G00 | | 00 | | | |
| BTN441 | pUC19- | hiv35 | NL43_A00B03C | 2534 | 1448-2994, | gag/pol |
| | NL43_A00B03C01 | | 01D00E00F00G | | 3620-4606 | |
| | D00E00F00G00 | | 00 | | | |
| BTN442 | pUC19- | hiv36 | NL43_A00B03C | 3520 | 1448-2994, | gag/pol/vif/vpr/tat/rev |
| | NL43_A00B03C01 | | 01D01E00F00G | | 3620-4606, | |
| | D01E00F00G00 | | 00 | | 5073-6058 | |
| BTN443 | pUC19- | hiv36 | NL43_A00B03C | 3520 | 1448-2994, | gag/pol/vif/vpr/tat/rev |
| | NL43_A00B03C01 | | 01D01E00F00G | | 3620-4606, | |
| | D01E00F00G00 | | 00 | | 5073-6058 | |
| BTN444 | pUC19- | hiv37 | NL43_A00B03C | 3745 | 1448-2994, | gag/pol/vif/vpr/tat/rev/vpu/env |
| | NL43_A00B03C01 | | 01D04E00F00G | | 3620-4606, | |
| | D04E00F00G00 | | 00 | | 5041-6251 | |
| BTN445 | pUC19- | hiv37 | NL43_A00B03C | 3745 | 1448-2994, | gag/pol/vif/vpr/tat/rev/vpu/env |
| | NL43_A00B03C01 | | 01D04E00F00G | | 3620-4606, | |
| | D04E00F00G00 | | 00 | | 5041-6251 | |
| BTN446 | pUC19- | hiv52 | NL43_A00B06C | 1847 | 1469-2328, | gag/pol |
| | NL43_A00B06C01 | | 01D00E00F00G | | 3620-4606 | |
| | D00E00F00G00 | | 00 | | | |
| BTN447 | pUC19- | hiv52 | NL43_A00B06C | 1847 | 1469-2328, | gag/pol |
| | NL43_A00B06C01 | | 01D00E00F00G | | 3620-4606 | |
| | D00E00F00G00 | | 00 | | | |
| BTN454 | pUC19- | hiv20 | NL43_A00B01C | 1016 | 1636-2651 | gag/pol |
| | NL43_A00B01C00 | | 00D00E00F00G | | | |
| | D00E00F00G00 | | 00 | | | |
| BTN477 | pUC19- | hiv02 | NL43_A00B00C | 986 | 5073-6058 | vif/vpr/tat/rev |
| | NL43_A00B00C00 | | 00D01E00F00G | | | |
| | D01E00F00G00 | | 00 | | | |
| BTN478 | pUC19- | hiv04 | NL43_A00B00C | 986 | 5073-6058 | vif/vpr/tat/rev |
| | NL43_A00B00C00 | | 00D0E00F00G | | | |
| | D02E00F00G00 | | 00 | | | |
| BTN479 | pUC19- | hiv06 | NL43_A00B00C | 1089 | 5071-6159 | vif/vpr/tat/rev/vpu |
| | NL43_A00B00C00 | | 00D03E00F00G | | | |
| | D03E00F00G00 | | 00 | | | |
| BTN480 | pUC19- | hiv08 | NL43_A00B00C | 1211 | 5041-6251 | vif/vpr/tat/rev/vpu/env |
| | NL43_A00B00C00 | | 00D04E00F00G | | | |
| | D04E00F00G00 | | 00 | | | |
| BTN481 | pUC19- | hiv03 | NL43_A00B00C | 1160 | 5073-6058, | vif/vpr/tat/rev/nef/U3 |
| | NL43_A00B00C00 | | 00D01E00F01G | | 9116-9289 | |
| | D01E00F01G00 | | 00 | | | |
| BTN482 | pUC19- | hiv05 | NL43_A00B00C | 1160 | 5073-6058, | vif/vpr/tat/rev/nef/U3 |
| | NL43_A00B00C00 | | 00D02E00F01G | | 9116-9289 | |
| | D02E00F01G00 | | 00 | | | |
| BTN483 | pUC19- | hiv07 | NL43_A00B00C | 1263 | 5071-6159, | vif/vpr/tat/rev/vpu/nef/U3 |
| | NL43_A00B00C00 | | 00D03E00F01G | | 9116-9289 | |
| | D03E00F01G00 | | 00 | | | |
| BTN484 | pUC19- | hiv09 | NL43_A00B00C | 1385 | 5041-6251, | vif/vpr/tat/rev/vpu/env/nef/U3 |
| | NL43_A00B00C00 | | 00D04E00F01G | | 9116-9289 | |
| | D04E00F01G00 | | 00 | | | |
| BTN485 | pUC19- | hiv09 | NL43_A00B00C | 1385 | 5041-6251, | vif/vpr/tat/rev/vpu/env/nef/U3 |
| | NL43_A00B00C00 | | 00D04E00F01G | | 9116-9289 | |
| | D04E00F01G00 | | 00 | | | |
| BTN486 | pUC19- | hiv09 | NL43_A00B00C | 1385 | 5041-6251, | vif/vpr/tat/rev/vpu/env/nef/U3 |
| | NL43_A00B00C00 | | 00D04E00F01G | | 9116-9289 | |
| | D04E00F01G00 | | 00 | | | |
| BTN487 | pUC19- | hiv10 | NL43_A00B00C | 987 | 3620-4606 | pol |
| | NL43_A00B00C01 | | 01D00E00F00G | | | |
| | D00E00F00G00 | | 00 | | | |
| BTN488 | pUC19- | hiv10 | NL43_A00B00C | 987 | 3620-4606 | pol |
| | NL43_A00B00C01 | | 01D00E00F00G | | | |
| | D00E00F00G00 | | 00 | | | |
| BTN489 | pUC19- | hiv12 | NL43_A00B00C | 1973 | 3620-4606, | pol/vif/vpr/tat/rev |
| | NL43_A00B00C01 | | 01D01E00F00G | | 5073-6058 | |
| | D01E00F00G00 | | 00 | | | |
| BTN490 | pUC19- | hiv14 | NL43_A00B00C | 1973 | 3620-4606, | pol/vif/vpr/tat/rev |
| | NL43_A00B00C01 | | 01D02E00F00G | | 5073-6058 | |
| | D02E00F00G00 | | 00 | | | |
| BTN491 | pUC19- | hiv14 | NL43_A00B00C | 1973 | 3620-4606, | pol/vif/vpr/tat/rev |
| | NL43_A00B00C01 | | 01D02E00F00G | | 5073-6058 | |
| | D02E00F00G00 | | 00 | | | |
| BTN492 | pUC19- | hiv16 | NL43_A00B00C | 2076 | 3620-4606, | pol/vif/vpr/tat/rev/vpu |
| | NL43_A00B00C01 | | 01D03E00F00G | | 5071-6159 | |
| | D03E00F00G00 | | 00 | | | |
| BTN493 | pUC19- | hiv16 | NL43_A00B00C | 2076 | 3620-4606, | pol/vif/vpr/tat/rev/vpu |
| | NL43_A00B00C01 | | 01D03E00F00G | | 5071-6159 | |
| | D03E00F00G00 | | 00 | | | |
| BTN494 | pUC19- | hiv18 | NL43_A00B00C | 2198 | 3620-4606, | pol/vif/vpr/tat/rev/vpu/env |
| | NL43_A00B00C01 | | 01D04E00F00G | | 5041-6251 | |
| | D04E00F00G00 | | 00 | | | |
| BTN495 | pUC19- | hiv18 | NL43_A00B00C | 2198 | 3620-4606, | pol/vif/vpr/tat/rev/vpu/env |
| | NL43_A00B00C01 | | 01D04E00F00G | | 5041-6251 | |
| | D04E00F00G00 | | 00 | | | |
| BTN496 | pUC19- | hiv11 | NL43_A00B00C | 1161 | 3620-4606, | pol/nef/U3 |
| | NL43_A00B00C01 | | 01D00E00F01G | | 9116-9289 | |
| | D00E00F01G00 | | 00 | | | |
| BTN497 | pUC19- | hiv13 | NL43_A00B00C | 2147 | 3620-4606, | pol/vif/vpr/tat/rev/nef/U3 |
| | NL43_A00B00C01 | | 01D01E00F01G | | 5073-6058, | |
| | D01E00F01G00 | | 00 | | 9116-9289 | |
| BTN498 | pUC19- | hiv15 | NL43_A00B00C | 2147 | 3620-4606, | pol/vif/vpr/tat/rev/nef/U3 |
| | NL43_A00B00C01 | | 01D02E00F01G | | 5073-6058, | |
| | D02E00F01G00 | | 00 | | 9116-9289 | |
| BTN499 | pUC19- | hiv17 | NL43_A00B00C | 2250 | 3620-4606, | pol/vif/vpr/tat/rev/vpu/nef/U3 |
| | NL43_A00B00C01 | | 01D03E00F01G | | 5071-6159, | |
| | D03E00F01G00 | | 00 | | 9116-9289 | |
| BTN500 | pUC19- | hiv17 | NL43_A00B00C | 2250 | 3620-4606, | pol/vif/vpr/tat/rev/vpu/nef/U3 |
| | NL43_A00B00C01 | | 01D03E00F01G | | 5071-6159, | |
| | D03E00F01G00 | | 00 | | 9116-9289 | |
| BTN501 | pUC19- | hiv19 | NL43_A00B00C | 2372 | 3620-4606, | pol/vif/vpritat/rev/vpu/envinef/U3 |
| | NL43_A00B00C01 | | 01D04E00F01G | | 5041-6251, | |
| | D04E00F01G00 | | 00 | | 9116-9289 | |
| BTN502 | pUC19- | hiv19 | NL43_A00B00C | 2372 | 3620-4606, | pol/vif/vpr/tat/rev/vpu/env/nef/U3 |
| | NL43_A00B00C01 | | 01D04E00F01G | | 5041-6251, | |
| | D04E00F01G00 | | 00 | | 9116-9289 | |
| BTN503 | pUC19- | hiv00 | NL43_A00B00C | 0 | none | none |
| | NL43_A00B00C00 | | 00D00E00F00G | | | |
| | D00E00F00G00 | | 00 | | | |
| BTN504 | pUC19- | hiv01 | NL43_A00B00C | 174 | 9116-9289 | nef/U3 |
| | NL43_A00B00C00 | | 00D00E00F01G | | | |
| | D00E00F01G00 | | 00 | | | |

### Construction of Wildtype Single-Block Plasids

[0440] All preparative PCR was performed using Q5 Hot Start High-Fidelity DNA Polymerase (New England Biolabs, #M0493L), hereafter referred to as Q5. All PCR was conducted at the 50 μl scale in 1x Q5 Reaction Buffer supplemented with single-thaw aliquots of dNTPs and with thermocycler parameters recommended by the Q5 manufacturer's protocol. Oligonucleotide sequences are listed in Table 6.

TABLE 6

| | | | SEQ ID |
|---|---|---|---|
| num | name | sequence | NO. |
| y530 | oTN5-F | /5Phos/CTGTCTCTTATACACATCTGCGGCCGC | 117 |
| y531 | oTN5-R | /5Phos/CTGTCTCTTATACACATCTTTAATTAATTCGCTACC | 118 |
| y468 | oBC20v1-F | CCGTCCATGAAGGGTTCGAT | 119 |
| y469 | oBC20v1-R | ACGAATCTGCCGTTGCCATA | 120 |
| y456 | oBC20v1-T | CCGTCCATGAAGGGTTCGATNNNNNNNNNNNNNNNNNNNNT | 121 |
| | | ATGGCAACGGCAGATTCGT | |
| y541 | opUC19_ | TCTAGAGTCGACCTGCAGGCATGC | 122 |
| | BamHI-F | | |
| y542 | opUC19_ | CCGGGTACCGAGCTCGAATTCACT | 123 |
| | BamHI-R | | |
| y126 | oNL43pol-F | GAGACAGGGCAAGAAACAGC | 124 |
| y127 | oNL43pol-R | AACAGGCGGCCTTAACTGTA | 125 |
| y229 | oMS2-F | TCCTGCTCAACTTCCTGTCGAG | 126 |
| y230 | oMS2-R | CAGGTCAAACCTCCTAGGAATG | 127 |
| y470 | opUC19Δ1-F | AGTGTAAAGCCTGGGGTGCCT | 128 |
| y471 | opUC19Δ1-R | TGACTGGGAAAACCCTGGCGT | 129 |
| y472 | opUC19Δ2-F | ATTGCGTTGCGCTCACTGCC | 130 |
| y473 | opUC19Δ2-R | GCCCTTCCCAACAGTTGCG | 131 |
| y474 | oNL43_A0_ | TTGTAAAACGACGGCCAGTGAATTCGAGCTCGGTACCCGGAG | 132 |
| | inner-F | GCCTCCACCTGGGTCTTG | |
| y475 | oNL43_A0_ | GCGGCCGCAGGCGATTAAGTTGGGTAACGCCAGGGTTTTCC | 133 |
| | outer-F | CAGTCACGGCGCGCCTTGTAAAACGACGGCCAGTGAATTC | |
| y476 | oNL43_A0-R | GCGGCCGCAGGCCCTGCATGCACTGGATGCAATCTATCCCAT | 134 |
| | | TCTGCA | |
| y477 | oNL43_B0-F | GCGGCCGCTGCAGAATGGGATAGATTGCATCCAGTGCATGCA | 135 |
| | | GGGCCT | |
| y478 | oNL43_B0-R | GCGGCCGCAGCTGTCCTTTTCTGGCAGCACTATAGGCTGTAC | 136 |
| | | TGTCCA | |
| y479 | oNL43_C0-F | GCGGCCGCTGGACAGTACAGCCTATAGTGCTGCCAGAAAAG | 137 |
| | | GACAGCT | |
| y480 | oNL43_C0_ | CATTAGGCACCCCAGGCTTTACACTGGCGCGCCATCTTGTAT | 138 |
| | inner-R | TACTACTGCCCCTTCACCTTTCCAGAGGAGC | |
| y481 | oNL43_C0_ | GCGGCCGCGTGAGTTAGCTCACTCATTAGGCACCCCAGGCTT | 139 |
| | outer-R | TACACT | |
| y482 | oNL43_D0-F | AGGCGATTAAGTTGGGTAACGCCAGGGTTTTCCCAGTCACGG | 140 |
| | | CGCGCCGCTCCTCTGGAAAGGTGAAGGGGCAGTAGTAATAC | |
| | | AAGAT | |
| y483 | oNL43_D0-R | GTGAGTTAGCTCACTCATTAGGCACCCCAGGCTTTACACTGG | 141 |
| | | CGCGCCCATTTACCAATACTACTTCTTGTGGGTTGGGGTCTGT | |
| | | GGG | |
| y484 | oNL43_E0_ | GTAACGCCAGGGTTTTCCCAGTCACGGCGCGCCCCCACAGA | 142 |
| | inner-F | CCCCAACCCACAAGAAGTAGTATTGGTAAATG | |
| y485 | oNL43_E0_ | GCGGCCGCAGGCGATTAAGTTGGGTAACGCCAGGGTTTTCC | 143 |
| | outer-F | CAGTCAC | |
| y486 | oNL43_E0-R | GCGGCCGCGCACAGGCTCCGCAGATCGTCCCAGATAAGTGC | 144 |
| | | TAAGGAT | |
| y487 | oNL43_F0-F | GCGGCCGCATCCTTAGCACTTATCTGGGACGATCTGCGGAGC | 145 |
| | | CTGTGC | |
| y488 | oNL43_F0-R | GCGGCCGCGCAGCTCTCGGGCCACGTGATGAAATGCTAGGC | 146 |
| | | GGCTGTC | |
| y489 | oNL43_G0-F | GCGGCCGCGACAGCCGCCTAGCATTTCATCACGTGGCCCGA | 147 |
| | | GAGCTGC | |
| y490 | oNL43_G0_ | TGATTACGCCAAGCTTGCATGCCTGCAGGTCGACTCTAGAGC | 148 |
| | inner-R | GCGATCTTGGCTCACTGC | |
| y491 | oNL43_G0_ | GCGGCCGCGTGAGTTAGCTCACTCATTAGGCACCCCAGGCTT | 149 |
| | outer-R | TACACTGGCGCGCCTGATTACGCCAAGCTTGCATGCCTG | |
| y661 | oNL43_AB-F | GCATCCAGTGCATGCAGGGCCT | 150 |
| y662 | oNL43_BC-R | CTGGCAGCACTATAGGCTGTACTGTCCA | 151 |
| y663 | oNL43_BC-F | TGGACAGTACAGCCTATAGTGCTGCCAG | 152 |
| y664 | oNL43_CD-R | CTACTGCCCCTTCACCTTTCCAGAGGAGC | 153 |
| y665 | oNL43_CD-F | GCTCCTCTGGAAAGGTGAAGGGGCAGTAG | 154 |
| y666 | oNL43_DE-R | CTACTTCTTGTGGGTTGGGGTCTGTGGG | 155 |
| y667 | oNL43_DE-F | CCCACAGACCCCAACCCACAAGAAGTAG | 156 |
| y668 | oNL43_EF-R | GGCTCCGCAGATCGTCCCAGATAAGTGC | 157 |
| y669 | oNL43_EF-F | GCACTTATCTGGGACGATCTGCGGAGCC | 158 |
| y670 | oNL43_FG-R | GGCCACGTGATGAAATGCTAGGCGGC | 159 |
| y671 | oNL43_FG-F | GCCGCCTAGCATTTCATCACGTGGCC | 160 |
| y672 | oNL43_gag | TGGGACAGCTACAACCATCCCT | 161 |
| | MA_178 bp-F | | |
| y673 | oNL43_gag | GCTGCTGCTTGCTGTGCCTT | 162 |
| | MA_178 bp-R | | |

[0441] Linearized vectors were prepared by 15 cycles of PCR using 1 ng of pUC19 as template with Q5. pUC19Δ1 was obtained by PCR with oligos y470 and y471. pUC19Δ2 was obtained by PCR with oligos y472 and y473 that had been 5′ phosphorylated with T4 PNK (New England Biolabs). pUC19Bam was obtained by PCR with oligos y541 and y542. After the cycling was completed, each reaction was supplemented with 20 U of Dpnl (New England Biolabs), mixed, then incubated for 1 h at 37° C. to eliminate template DNA, then purified by a silica column cleanup with Zymo DCC-5 (Zymo Research, DCC-5). The NL43-WT cloning PCR scheme is provided below in Table 7.

TABLE 7
NL43-WT-cloning-PCR-scheme

| name | size | template | fwd olig. | rev olig. |
|---|---|---|---|---|
| pUC19Δ1 | 2522 | pUC19/BamHI | y470 | y471 |
| pUC19Δ2 | 2384 | pUC19/BamHI | y472 + Pᵢ | y473 + Pᵢ |
| pUC19Bam | 2684 | pUC19/BamHI | y541 | y542 |
| NL43_A00_inner | 1788 | pNL4-3/EcoRI | y474 | y476 + Pᵢ |
| NL43_A00 | 1844 | NL43_A00_inner | y475 + Pᵢ | y476 + Pᵢ |
| NL43_B00 | 1904 | pNL4-3/EcoRI | y477 + Pᵢ | y478 + Pᵢ |
| NL43_C00_inner | 1766 | pNL4-3/EcoRI | y479 + Pᵢ | y480 |
| NL43_C00 | 1789 | NL43_C00_inner | y479 + Pᵢ | y481 + Pᵢ |
| NL43_D00 | 1633 | pNL4-3/EcoRI | y482 + Pᵢ | y483 + Pᵢ |
| NL43_E00_inner | 2102 | pNL4-3/BamHI | y484 | y486 + Pᵢ |
| NL43_E00 | 2125 | NL43_E00_inner | y485 + Pᵢ | y486 + Pᵢ |
| NL43_F00 | 931 | pNL4-3/EcoRI | y487 + Pᵢ | y488 + Pᵢ |
| NL43_G00_inner | 453 | pNL4-3/BamHI | y489 + Pᵢ | y490 |
| NL43_G00 | 509 | NL43_G00_inner | y489 + Pᵢ | y491 + Pᵢ |

[0442] Three of the seven single-block inserts (NL43_B00, NL43_D00 and NL43_F00) were amplified by 15 cycles of PCR using 1 ng of BamHI- or EcoRI-cut pNL4-3 as template and the oligos listed in Table 6. Post-thermocycling, each reaction was supplemented with 20 U of Dpnl (New England Biolabs), mixed, then incubated for 1 h at 37° C. to eliminate template DNA, then purified by a silica column cleanup with Zymo DCC-5 (Zymo Research, DCC-5).

[0443] The remaining four single-block inserts (NL43_A00, NL43_C00, NL43_E00, NL43_G00) were amplified by two rounds of PCR, using the oligos listed in Table 6. An “inner” PCR product was obtained by 15 cycles of PCR using 1 ng of EcoRl-cut pNL4-3 as template. The final linear product was obtained by an additional 10 cycles of PCR, using 0.5 μl of the “inner” PCR product as template in a new 50 μl PCR reaction. Post-thermocycling, each reaction was supplemented with 20 U of Dpn*I (New England Biolabs), mixed, then incubated for 1 h at 37° C. to eliminate template DNA, then purified by a silica column cleanup with Zymo DCC-5 (Zymo Research, DCC-5).

[0444] Single-block plasmids were constructed by TA-cloning. Linearized vectors (pUC19Δ1 and pUC19Δ1) were 3′ dA-tailed by incubating 2 μg linear vector DNA, 200 μM dATP, 15 U of Klenow Fragment (exo⁻) (New England Biolabs), in a 50 μl reaction in 1x NEB Buffer 2 for 2 h at 37° C. DNA was purified from the reaction by DCC-5 silica column cleanup (Zymo Research). The seven wildtype inserts (NL43_A00, NL43_B00, . . . , NL43_G00) were 3′ dT-tailed by incubating 2 μg insert DNA, 200 μM dTTP, 15 U of Klenow Fragment (exo⁻) (New England Biolabs), in a 50 μl reaction in 1x NEB Buffer 2 for 2 hours at 37° C. DNA was purified from the reaction by DCC-5 silica column cleanup (Zymo Research).

[0445] All ligations were performed using T4 DNA Ligase (New England Biolabs, Quick Ligation Kit, #M2200L). To construct pUC19Δ1-NL43_D00, 50 ng of 3′ dT-tailed NL43_D00 were ligated into 50 ng of 3′ dA-tailed pUC19A1 in a 20 μl reaction for 30 min at 25° C.

[0446] To construct the remaining six single-block wildtype plasmids (-NL43_x, where x is one of {A00,B00,C00,E00,F00,G00}), 50 ng of 3′ dT-tailed NL43_x were ligated into 50 ng of 3′ dA-tailed in a 20 μl reaction for 30 min at 25° C.

[0447] Chemically competent DH10B E. coli were transformed with the ligation mixture, recovered for 1 hour at 37° C., then plated on LB plates supplemented with 100 μg/ml carbenicillin and grown overnight at 37° C. Single colonies were obtained and plasmids characterized by Sanger sequencing across the insert region and diagnostic restriction digests. All wildtype single-block plasmids are enumerated in Table 3.

### Construction of Mutant Single-Block Plasmids

[0448] Deletion mutant pieces were ordered as synthetic dsDNA molecules (Integrated DNA Technologies, gBlocks). A total of 13 mutant blocks were ordered (7× B-blocks (B01, B02, B03, B04, B05, B06, B07), 1×C-block (001), 4×D-blocks (D01, D02, D03, D04), and 1×F-block (F01)).

[0449] Mutant blocks NL43_D01, NL43_D02, NL43_D03, and NL43 DO4 were cloned into pUC19Δ1 linear PCR product by Gibson Assembly (Gibson Assembly HiFi 1-Step Kit, SGI-DNA) via the manufacturer's protocol. The remaining 9 mutant blocks (NL43_B01, . . . ,NL43_F01) were cloned into pUC19,82 linear PCR product by Gibson Assembly (Gibson Assembly HiFi 1-Step Kit, SGI-DNA). After a 1 hour incubation at 50° C., the 10 μl Gibson Assembly reactions were diluted by adding 50 μl of TE. One μl of the diluted mix was used to transform 40 μl of electrocompetent DH10B E. coli. The transformations were recovered for 1 hour at 37° C., then plated on LB plates supplemented with 100 μg/ml carbenicillin and grown overnight at 37° C. Single colonies were obtained and plasmids characterized by Sanger sequencing across the insert region and diagnostic restriction digests. All single-block plasmids are enumerated in Table 8.

TABLE 8
NL4-3-singlePiecePlasmids

| name | size | insert | backbone | enzyme |
|---|---|---|---|---|
| pUC19Δ2-NL43_A00 | 4229 | 1836 | 2394 | Notl |
| pUC19Δ2-NL43_B00 | 4290 | 1896 | 2394 | Notl |
| pUC19Δ2-NL43_B01 | 3334 | 935 | 2394 | Notl |
| pUC19Δ2-NL43_B02 | 2989 | 590 | 2394 | Notl |
| pUC19Δ2-NL43_B03 | 2803 | 404 | 2394 | Notl |
| pUC19Δ2-NL43_B04 | 3442 | 1043 | 2394 | Notl |
| pUC19Δ2-NL43_B05 | 3525 | 1126 | 2394 | Notl |
| pUC19Δ2-NL43_B06 | 3490 | 1091 | 2394 | Notl |
| pUC19Δ2-NL43_B07 | 3554 | 1155 | 2394 | Notl |
| pUC19Δ2-NL43_C00 | 4174 | 1781 | 2394 | Notl |
| pUC19Δ2-NL43_C01 | 3250 | 857 | 2394 | Notl |
| pUC19Δ1-NL43_D00 | 4076 | 1545 | 2531 | Ascl |
| pUC19Δ1-NL43_D01 | 622 | 622 | 2531 | Ascl |
| pUC19Δ1-NL43_D02 | 561 | 561 | 2531 | Ascl |
| pUC19Δ1-NL43_D03 | 519 | 519 | 2531 | Ascl |
| pUC19Δ1-NL43_D04 | 397 | 397 | 2531 | Ascl |
| pUC19Δ2-NL43_E00 | 4510 | 2117 | 2394 | Notl |
| pUC19Δ2-NL43_F00 | 3317 | 923 | 2394 | Notl |
| pUC19Δ2-NL43_F01 | 3205 | 812 | 2394 | Notl |
| pUC19Δ2-NL43_G00 | 2895 | 501 | 2394 | Notl |

### Construction of 3-Block Plasmids

[0450] To construct plasmids harboring subassemblies of 3 blocks (ABC or EFG as shown in FIG. 39, single blocks were liberated from their respective plasmids by digestion and gel-purified from plasmid backbone. To assemble ABC 3-block plasmids, a pool of liberated A,B,C blocks were combined with linear pUC19Δ1 and incubated for 1 hour at 50° C. in Gibson Assembly master mix (Gibson Assembly HiFi 1-Step Kit, SGI-DNA). To assemble EFG 3-block plasmids, a pool of liberated E,F,G blocks were combined with linear pUC19,82 and incubated for 1 hour at 50° C. in Gibson Assembly master mix (Gibson Assembly HiFi 1-Step Kit, SGI-DNA).

[0451] After a 1 hour incubation at 50° C., the 10 μl Gibson Assembly reactions were diluted by adding 50 μl of TE. One μl of the diluted mix used to transform 40 μl of electrocompetent DH1OB E. coli.

[0452] The transformations were recovered for 1 hour at 37° C., then plated on LB plates supplemented with 100 μg/ml carbenicillin and grown overnight at 37° C. Single colonies were obtained and plasmids characterized by Sanger sequencing across junction regions joined by Gibson Assembly and diagnostic restriction digests.

### Construction of 7-Block Plasmids (Full-Length Virus)

[0453] 3-block inserts (ABC and EFG) were liberated from 3-block plasmids by digestion with Ascl and gel-purified from the backbone. D blocks were liberated by digestion of 1-block D plasmids. A three-insert Gibson assembly was performed by combining an ABC 3-block insert, a D-block insert, and a EFG 3-block insert with pUC19Bam and incubated 1 hour at 50° C. in Gibson Assembly master mix (Gibson Assembly HiFi 1-Step Kit, SGI-DNA) per the manufacturer's instruction.

[0454] After a 1 hour incubation at 50° C., the 10 μl Gibson Assembly reactions were diluted by adding 50 μl of TE. One μl of the 1:5 diluted mix used to transform 40 μl of electrocompetent DH1OB E. coli.

[0455] The transformations were recovered for 90 min at 30° C., then plated on LB plates supplemented with 25 μg/ml carbenicillin and grown overnight at 32° C. Single colonies were obtained and plasmids characterized by Sanger sequencing across junction regions joined by Gibson Assembly. Diagnostic restriction digests were also performed to confirm that the 7-block plasmids had the correct topology. All 7-block plasmids (full-length virus) are listed in Table 5.

### Characterization of Deletion Mutants

[0456] Deletion mutants were assayed for three properties: replication-competence (can spread without wildtype virus), interfere with WT virus (by competing for common goods or another mechanism), and mobilized by the wildtype virus (efficiently trans-complemented. Supercoiled plasmid stocks of the mutant library were arrayed in 96-well plate format at a normalized DNA concentration (33 ng/). The collection of deletion mutants used the same vector backbone as the wildtype HIV-1 and had similar sizes (9-12 kbp mutants compared to 15 kbp wildtype). A related HIV-1 molecular clone (NLENG1-I RES), which we refer to as NL43G was used as positive control. NL43G is tagged with EGFP in the nef locus. Productively infected cells can be visualized by GFP fluorescence after approximately 20 hours of infection.

### Production of Virus and Pseudovirus Stocks

[0457] Virus pools were obtained by co-transfection of 293T with one or more plasmids. On the day of transfection, a suspension of 293T was obtained by trypsinization of subconfluent 15-cm plates of 293T and brought into single cell suspension by gentle passage through a 40 μm mesh filter (Corning). A cell count was obtained with an automated Coulter cell counter (Moxi, ORFLO), and cells were diluted to a concentration of 5·10⁵ cells/ml in D10. Two ml of this suspension (10⁶ cells) were added to each well of a series of 6-well polystyrene tissue culture plates.

[0458] Transfection complexes were prepared in 96-well polypropylene PCR plates under sterile conditions. A total of 2 μg of supercoiled plasmid DNA in (10 mM Tris-Cl, pH 8.0; 0.1 mM EDTA, pH 8.0) was added to each well and the volume brought to 100 μl by the addition of serum-free DMEM supplemented with 25 mM HEPES. Next, 106 μg of a mixture comprised of 100:6 (v:v) of serum free-DMEM supplemented with 25 mM HEPES and 1 mg/ml polyethyleneimine (PEI) in dH₂O (prepared from 25 kDa linear PEI; Polysciences #23966-1) were added and the contents mixed by pipetting up and down 15× with the multichannel pipette volume set to 106 μl. The transfection mixture was incubated at room temperature (24° C.) for 15 min, then the contents of each well in the 96-well plate added to a corresponding well of 10⁶ 293T prepared above. The 6-well plates were gently rocked to distribute the transfection complexes, and then placed in a humidified 37° C. incubator with a 95% air/5% CO₂ atmosphere. At 16 h post-transfection, the culture media was aspirated and replaced with 2.5 ml of D10. At 43-48 hours post-transfection, the virus-containing media was harvested and clarified by passage through a 0.45 μm sterile filter (Millipore). The filtrate was immediately used to infect target cells.

### Determination of Replication Competence

[0459] Virus stocks were prepared as described above, where the 2 μg mass of plasmid DNA in each well was comprised entirely of a single HIV-1 molecular clone or deletion mutant. An EGFP-tagged molecular clone (pNLENG1-IRES), which encodes NL4-3 with an EGFP::IRES::nef cassette in the nef locus was used as a positive control for replication competence (Levy, D. N. et al. PNAS, 101, 4204-4209 (2004)). We refer to this clone as NL43G for simplicity.

[0460] MT-4 (Miyoshi, I. et al. Gann. Monogr., 28 (1982)), (a highly-permissive, highly-susceptible T cell line) were infected with the prepared viral stocks in a 96-well U-bottom plate format. All infections were performed in duplicate. In each well, 10⁵ MT-4 in 150 μl of R10 were mixed with 50 μl of virus stock by pipetting up and down 4x, and then returned to a 37° C. incubator. Cultures were split 1:10 with fresh media every 3-4 days and the wells assayed for infection visually (for cytopathic effect/cell lysis) at each split.

[0461] At 5 days post-infection, 90 μl of the cell mixture from each well were transferred to a 96-well opaque plastic plate (OptiPlate96-F, PerkinElmer) and mixed with 10 μl of PrestoBlue Cell Viability Reagent (ThermoFisher, #A13261). The plate was sealed with a gas-permeable adhesive seal (ThermoFisher, #AB0718) and incubated for 90 min at 37° C. The reaction was quenched and virus inactivated by addition of 50 μl of 3% (m/v) SDS solution to each well. Fluorescence was read on an EnSpire Plate Reader (PerkinElmer) with the monochromator set to excitation/emission wavelengths of 560/590 nm.

[0462] At 5 days post-infection, the MT-4 were assessed for viability visually and by a metabolic assay (PrestoBlue), which detects live, metabolically active cells that have a functional electron transport chain. Thus, wells infected with replication-competent virus will be mostly killed (based on live cell data), and have a low metabolic activity, which is detectable by low fluorescence signal in the plate reader assay.

### Interference Assay by Co-Transfection

[0463] Virus stocks were prepared as described above, but the 2 μg mass of plasmid DNA in each well was comprised of 1 μg of a single HIV-1 molecular clone or deletion mutant and 1 μg of pNLENG1-IRES.

[0464] MT-4 cells were infected with the prepared viral stocks in a 96-well U-bottom plate format. All infections were performed in duplicate. In each well, 10⁵ MT-4 in 150 μl of R10 were mixed with 50 μl of virus stock by pipetting up and down 4×, and then returned to a 37° C. incubator.

[0465] At 24 and 48 hours post-infection, cells were resuspended and 50 μl (25% of the volume) removed for analysis by flow cytometry. The 50 μl sample was fixed by addition of 0.1 volumes of a 20% formaldehyde solution (tousimis, #1008A) and incubated for at least 1 hour at 4° C. before cytometry. Cells were scored for EGFP-expression by analyzing a portion of each sample on an HTFC IntelliCyt flow cytometer (488 nm excitation, 530/30 nm bandpass emission).

[0466] The cell population was scored for GFP+ cells by flow cytometry at 24 and 48 hpi. All mutants are untagged: the only source of GFP production is infection with wildtype NL43G virus. If a mutant does not interfere with WT virus replication, than the presence or absence of the subgenomic mutant will not affect GFP+levels. Conversely, if we observe a change in GFP+ compared to wildtype (NL43G only), the mutant either enhances wildtype virus replication (higher levels of GFP+ cells) or interferes (decreases levels of GFP+cells).

Assay for Mobilization from 293T

[0467] Cloned mutants were tested for transmissibility: could they be encapsidated and transmitted by supply the missing trans-acting elements via transfection. A packaging cell line (239T) was co-transfected with the mutant viral genome plasmid and two additional plasmids: a packaging plasmid (pCMVRΔ8.91), which provides several HIV-1 proteins in trans (Gag, Pol, Tat, Rev), but is not replication-competent), and an envelope pseudotyping plasmid which provides a pan-tropic VSV-G envelope protein (pMD.G).

[0468] Virus stocks were prepared as described above, but the 2 μg mass of plasmid DNA in each well was comprised of 500 ng of a single HIV-1 molecular clone or deletion mutant, 500 ng of a VSV-G pseudotyping plasmid (pMD.G from Naldini, L. Science 272, 263-7 (1996)), and 1000 ng of a 2nd generation lentivirus packaging plasmid (pCMVRΔ8.91 from Zufferey, R. et al. Nature Biotechnology, 15, 871-5, (1997)). 48 hours post-transfection of 293T, virus-containing supernatant was harvested, clarified, and used to transduce a T-cell line (MT-4), and the cells allowed to recover and outgrow for 5 days.

[0469] MT-4 cells were transduced/infected with the prepared viral stocks in a 96-well U-bottom plate format. All infections were performed in duplicate. In each well, 10⁵ MT-4 in 150 μl were mixed with 50 μl of virus stock by pipetting up and down 4×, and then returned to a 37° C. incubator. Cultures were split 1:10 with fresh R10 media every 3-4 days and the wells assayed for infection visually (for cytopathic effect/cell lysis) at each split.

[0470] At 5 days post-infection, the transduced cells were washed 2× in 700 μl DPBS and genomic DNA isolated from the cell pellet using a commercial kit (Macherey-Nagel, NucleoSpin Blood). Each transduced culture was assessed for transduction efficiency by performing PCR with primers specific to block B and block D, using DNA isolated from the transduced cells as template.

[0471] PCR of gDNA isolated from transduced MT-4 was performed to test for transduction/mobilization of DIP candidates. Block B was amplified by PCR from gDNA template with oligos oNL43_AB-F and oNL43_BC-R. Block D was amplified by PCR from gDNA template with oligos oNL43_CD-F and oNL43_DE-R. PCR reactions were performed with OneTaq DNA Polymerase (New England Biolabs, #M0480L). Each 20 μl PCR reaction consisted of 2.0 μl template DNA, 0.4 μl of 10 μM forward oligo, 0.4 μl of 10 μM reverse oligo, 0.4 μl of 10 mM dNTP, 4.0 μl of 5× OneTaq DNA Polymerase Reaction Buffer, 0.1 μl OneTaq DNA Polymerase (5 U/μl), and 12.7 μl dH2O. Thermocycling conditions (in mm:ss format) were (1 cycle of 95° C. for 5:00; 35 cycles of 94° C. for 0:15, 61° C. for 0:30, 68° C. for 1:30; 1 cycle of 68° C. for 5:00; 1 cycle of 10° C. for HOLD).

### Results

### Determination of Replication Competence

[0472] As shown in FIG. 42 and FIG. 43, the only clones for which cell killing is evident are NL43G (WT control), the A00B000C00D00E00F00G00 mutant (WT genotype) and a mutant with a single deletion in nef-deletion mutant (F01). This is consistent with literature reports, as nef is dispensable for replication of certain strains of HIV-1 in permissive cells lines, such as MT-4. Thus, this validates that the cloning strategy employed can reconstruct viruses with full wildtype activity.

[0473] No loss in cell viability was observed for the other 59 of 61 molecular clones, which contain deletions in one or more essential trans-acting elements. These cultures were outgrown and inspected visually for up to 14 days, but no cytopathic effect of loss of viability was observed in the remaining 59 mutants (data not shown).

[0474] Thus, the 59 deletion mutants are not replication-competent and must be trans-complemented by wildtype virus to transmit.

### Interference Assay by Co-Transfection

[0475] Results of the interference assay are shown in FIG. 44, FIG. 45, FIG. 46, FIG. 47 and FIG. 48.

[0476] At 24 hpi (FIG. 44, FIG. 45, FIG. 46), 13-17% of cells were GFP+in the control NL43G infection, compared to <1% in the uninfected control (naive). Co-transfection with the reconstituted replication-competent HIV-1 clones had little effect on single-round wildtype HIV-1 NL43G replication (WT: 11-15% GFP⁺, Δnef. 11-13% GFP⁺).

[0477] In contrast, many of the multiply deleted clones showed strong interference with wildtype HIV-1 replication, eliciting 0.5 log₁₀-1.0 log₁₀ reductions in infectious titer with respect to wildtype. The strongest interference effect was observed in clones harboring both deletions in gag and deletions in the accessory tract of the HIV-1 genome (vif-vpu). With no deletions in gag (B00), few of the clones exhibiting strong interference, except for those that also had deletions in pol and nef. No clones showed any consistent enhancement of HIV-1 infection, as defined by an average increase of >30%).

[0478] At 24 hpi, the presence (FIG. 46) or absence (FIG. 44 and FIG. 45) of an HIV-1 protease inhibitor (Darunavir) did not affect the percentage of infected cells, reflecting that 24 hpi was appropriate timing to conduct single round studies of HIV-1 replication.

[0479] By 48 hpi, (FIG. 47 and FIG. 48), an additional round of HIV-1 replication will have occurred and interference effects will be easily detectable. As before, the strongest interference was observed in clones harboring both deletions in gag and deletions in the accessory tract of the HIV-1 genome (vif-vpu). With no deletions in gag (B00), few of the clones exhibit strong interference, except for those that also had deletions in pol and nef. Again, no clones showed consistent enhancement of HIV-1 infection as defined by an average increase of >30%.

[0480] Table 9 (see FIG. 50) serves as map between the data in FIGS. 43, 45, 48 and the sequence associated with each pair of 76 datapoints. In these figures, there are 76 pairs of blue dots moving left to right across the plot, a vertical line, then two pairs of green dots reflecting the controls. Table 9 identifies the mutants that are “replicating” or “not-replicating” (FIG. 43), or “interfering”/“not-interfering” (FIGS. 45 and 48). Some sequences are listed more than once because they had more than one associated bacterial strain (Table 5). The classification is dependent on whether the mean of the pair of points falls within/outside the gray rectangle in the plots.

[0481] Table 10 below classifies each of the unique 61 “hiv” sequences as replicating/not-replicating or interfering/not interfering by removing duplicate sequences*.

TABLE 10

| FIG. 43 | | FIG. 45 | | FIG. 48 | |
|---|---|---|---|---|---|
| | does not | | does not | | does not |
| replicates | replicate | interferes | interfere | interferes | interfere |
| 2 of 61 | 59 of 61 | 48 of 61 | 13 of 61 | 45 of 61 | 17 of 61 |
| hiv00 | hiv09 | hiv54 | hiv38 | hiv54 | hiv01 |
| hiv01 | hiv19 | hiv11 | hiv29 | hiv58 | hiv53 |
| | hiv02 | hiv58 | hiv01 | hiv44 | hiv19 |
| | hiv16 | hiv47 | hiv26 | hiv47 | hiv38 |
| | hiv52 | hiv44 | hiv00 | hiv55 | hiv51 |
| | hiv17 | hiv60 | hiv04 | hiv31 | hiv29 |
| | hiv13 | hiv49 | hiv05 | hiv11 | hiv05 |
| | hiv14 | hiv42 | hiv09 | hiv60 | hiv04 |
| | hiv18 | hiv55 | hiv08 | hiv42 | hiv26 |
| | hiv04 | hiv10 | hiv06 | hiv21 | hiv17 |
| | hiv11 | hiv28 | hiv07 | hiv28 | hiv00 |
| | hiv06 | hiv31 | hiv03 | hiv49 | hiv09 |
| | hiv15 | hiv15 | hiv02 | hiv37 | hiv08 |
| | hiv08 | hiv21 | | hiv27 | hiv06 |
| | hiv10 | hiv27 | | hiv23 | hiv03 |
| | hiv37 | hiv14 | | hiv56 | hiv02 |
| | hiv20 | hiv23 | | hiv48 | hiv07 |
| | hiv35 | hiv37 | | hiv24 | |
| | hiv03 | hiv48 | | hiv32 | |
| | hiv07 | hiv56 | | hiv45 | |
| | hiv36 | hiv24 | | hiv14 | |
| | hiv25 | hiv45 | | hiv10 | |
| | hiv23 | hiv32 | | hiv30 | |
| | hiv32 | hiv52 | | hiv15 | |
| | hiv51 | hiv33 | | hiv36 | |
| | hiv53 | hiv30 | | hiv52 | |
| | hiv05 | hiv59 | | hiv25 | |
| | hiv60 | hiv36 | | hiv59 | |
| | hiv39 | hiv13 | | hiv33 | |
| | hiv12 | hiv22 | | hiv46 | |
| | hiv41 | hiv46 | | hiv35 | |
| | hiv59 | hiv25 | | hiv22 | |
| | hiv54 | hiv12 | | hiv13 | |
| | hiv57 | hiv34 | | hiv43 | |
| | hiv46 | hiv57 | | hiv50 | |
| | hiv56 | hiv16 | | hiv40 | |
| | hiv58 | hiv18 | | hiv34 | |
| | hiv42 | hiv35 | | hiv12 | |
| | hiv45 | hiv50 | | hiv57 | |
| | hiv48 | hiv43 | | hiv39 | |
| | hiv55 | hiv39 | | hiv18 | |
| | hiv47 | hiv40 | | hiv16 | |
| | hiv40 | hiv19 | | hiv41 | |
| | hiv43 | hiv17 | | hiv20 | |
| | hiv22 | hiv20 | | hiv19 | |
| | hiv38 | hiv41 | | | |
| | hiv30 | hiv53 | | | |
| | hiv44 | hiv51 | | | |
| | hiv29 | | | | |
| | hiv26 | | | | |
| | hiv50 | | | | |
| | hiv24 | | | | |
| | hiv31 | | | | |
| | hiv27 | | | | |
| | hiv28 | | | | |
| | hiv33 | | | | |
| | hiv49 | | | | |
| | hiv21 | | | | |
| | hiv34 | | | | |

*For the hiv19 sequence, one of the “hiv19” clones was classified as “interfering” and the other was classified as “non-interfering”.

Assay for Mobilization from 293T

[0482] As shown in FIG. 49, the appearance of distinct PCR products at a length less than the WT Block B (1.9 kbp) or WT Block D (1.5 kbp), indicates that MT-4 cells were successfully transduced with the deletion mutant (indicating mobilization) and that the mutant did not lead to cell death (as occurred in some control reactions). For this reason, BTN503 (reconstituted wildtype) and BTN504 (Δnef) showed weak amplification, as the cells were destroyed by viral infection. Approximately 50% (31 of 61) of the deletion mutants showed clear mobilization from 293T from co-transfection.

1. A method of generating a deletion library, comprising:
(a) inserting a transposon cassette comprising a target sequence for a sequence specific DNA endonuclease into a population of circular target DNAs to generate a population of transposon-inserted circular target DNAs;
(b) contacting the population of transposon-inserted circular target DNAs with the sequence specific DNA endonuclease to generate a population of cleaved linear target DNAs;
(c) contacting the population of cleaved linear target DNAs with one or more exonucleases to generate a population of deletion DNAs; and
(d) circularizing the deletion DNAs to generate a library of circularized deletion DNAs.

2. The method of claim 1, wherein the circular target DNAs are plasmids that comprise a viral genome.

3. The method of claim 2, wherein the method further comprises introducing members of the library of circularized deletion DNAs into mammalian cells, and assaying for viral infectivity.

4. The method of claim 2, wherein the method further comprises sequencing members of the library of circularized deletion DNAs to identify defective interfering particles (DIPs).

5. The method of claim 1, wherein the sequence specific DNA endonuclease is selected from: a meganuclease, a CRISPR/Cas endonuclease, a zinc finger nuclease, or a TALEN.

6. The method of claim 1, wherein the method comprises inserting a barcode sequence prior to or simultaneous with step (d).

7. The method of claim 1, wherein the one or more exonucleases comprises T4 DNA polymerase.

8. The method of claim 1, wherein the one or more exonucleases comprises a 3′ to 5′ exonuclease and a 5′ to 3′ exonuclease.

9. The method of claim 1, wherein the one or more exonucleases comprises RecJ.

10. The method of claim 1, wherein the step of contacting the population of cleaved linear target DNAs with one or more exonucleases is performed in the presence of a single strand binding protein (SSB).

11. The method of claim 1, wherein the transposon cassette comprises a first recognition sequence positioned at or near one end of the transposon cassette and a second recognition sequence positioned at or near the other end of the transposon cassette.

12. The method of claim 1, further comprising, prior to step (a), circularizing a population of linear DNA molecules to generate said population of circular target DNAs.

13. The method of claim 12, wherein the population of linear DNA molecules comprises one or more PCR products, one or more linear viral genomes, and/or one or more restriction digest products.

14. The method of claim 1, further comprising introducing members of the library of circularized deletion DNAs into mammalian cells.

15. The method of claim 1, further comprising generating from the library of circularized deletion DNAs, at least one of: linear double stranded DNA (dsDNA) products, linear single stranded DNA (ssDNA) products, linear single stranded RNA (ssRNA) products, and linear double stranded RNA (dsRNA) products.

16. The method of claim 15, further comprising introducing said linear dsDNA products, linear ssDNA products, linear ssRNA products, and/or linear dsRNA products into mammalian cells.

17. A method of generating and identifying a defective interfering particle (DIP), comprising:
(a) inserting a target sequence for a sequence specific DNA endonuclease into a population of circular target viral DNAs, each comprising a viral genome, to generate a population of sequence-inserted viral DNAs;
(b) contacting the population of sequence-inserted viral DNAs with the sequence specific DNA endonuclease to generate a population of cleaved linear viral DNAs;
(c) contacting the population of cleaved linear viral DNAs with an exonuclease to generate a population of deletion DNAs;
(d) circularizing the deletion DNAs to generate a library of circularized deletion viral DNAs; and
(e) sequencing members of the library of circularized deletion viral DNAs to identify deletion interfering particles (DIPs).

18. The method of claim 17, comprising, prior to step (a), circularizing a population of linear DNA molecules to generate said population of circular target viral DNAs.

19. The method of claim 18, wherein the population of linear DNA molecules comprises one or more PCR products, one or more linear viral genomes, and/or one or more restriction digest products.

20. The method of claim 17, wherein the method comprises inserting a barcode sequence prior to or simultaneous with step (d).

21. The method of claim 17, further comprising (i) introducing members of the library of circularized deletion viral DNAs into mammalian cells; and (ii) assaying for viral infectivity.

22. The method of claim 17, further comprising:
(i) generating from the library of circularized deletion viral DNAs, at least one of: linear double stranded DNA (dsDNA) products, linear single stranded DNA (ssDNA) products, linear single stranded RNA (ssRNA) products, and linear double stranded RNA (dsRNA) products.

23. The method of claim 22, further comprising, after step (i):
(ii) introducing said linear dsDNA products, linear ssDNA products, linear ssRNA products, and/or linear dsRNA products into mammalian cells; and
(iii) assaying for viral infectivity.

24. The method of claim 12, wherein the inserting of step (a) comprises inserting a transposon cassette into the population of circular target viral DNAs, wherein the transposon cassette comprises the target sequence for the sequence specific DNA endonuclease, and wherein said generated population of sequence-inserted viral DNAs is a population of transposon-inserted viral DNAs.

25. The method of claim 17, wherein the method comprises, after step (d), infecting mammalian cells in culture with members of the library of circularized deletion viral DNAs at a high multiplicity of infection (MOI), culturing the infected cells for a period of time ranging from 12 hours to 2 days, adding naive cells to the to the culture, and harvesting virus from the cells in culture.

26. The method of claim 17, wherein the method comprises, after step (d), infecting mammalian cells in culture with members of the library of circularized deletion viral DNAs at a low multiplicity of infection (MOI), culturing the infected cells in the presence of an inhibitor of viral replication for a period of time ranging from 1 day to 6 days, infecting the cultured cells with functional virus at a high MOI, culturing the infected cells for a period of time ranging from 12 hours to 4 days, and harvesting virus from the cultured cells.

27. A transposon cassette, comprising a DNA molecule comprising transposase compatible inverted terminal repeats (ITRs) flanking a sequence of interest, wherein the sequence of interest comprises a first copy and a second copy of a recognition sequence for a first meganuclease.

28. The transposon cassette of claim 27, wherein the sequence of interest includes a selectable marker gene, and said first and second copies flank the selectable marker gene.

29. The transposon cassette of claim 28, wherein the selectable marker gene encodes an antibiotic resistance protein.

30. The transposon cassette of claim 27, comprising a first copy and a second copy of a recognition sequence for a second meganuclease.

31. The transposon cassette of claim 30, wherein the first and second copies of the recognition sequence for the second meganuclease flank a selectable marker gene.

32. The transposon cassette of claim 27, wherein the transposase compatible inverted terminal repeats (ITRs) are cable of being recognized and utilized by a Tn5 transposase.

The application's sequence listing, which the Patent Office published only in electronic form, follows.

SEQUENCE LISTING (162 sequences)

SEQ ID NO: 1 - DNA, 26 bp, Artificial Sequence
  Synthetic sequence
aactataacggtcctaaggtagcgaa

SEQ ID NO: 2 - DNA, 26 bp, Artificial Sequence
  Synthetic sequence
aactataacggtcctaaggtagcgaa

SEQ ID NO: 3 - DNA, 3984 bp, Artificial Sequence
  Synthetic sequence
tcgcgcgtttcggtgatgacggtgaaaacctctgacacatgcagctcccggagacggtcacagcttgtctgtaagcggatgccgggagcagacaagcccgtcagggcgcgtcagcgggtgttggcgggtgtcggggctggcttaactatgcggcatcagagcagattgtactgagagtgcaccatatgcggtgtgaaataccgcacagatgcgtaaggagaaaataccgcatcaggcgccattcgccattcaggctgcgcaactgttgggaagggcgatcggtgcgggcctcttcgctattacgccagctggcgaaagggggatgtgctgcaaggcgattaagttgggtaacgccagggttttcccagtcacgacgttgtaaaacgacggccagtgaattcgagctcggtacccgggctgtctcttatacacatctgcggccgctagggataacagggtaatttagttagttagttaactataacggtcctaaggtagcgaaagatcttaagtaagtaagagtatacgtatatcggctaataacgtattaaggcgcttcggcgcctttttttatgggggtattttcatcccaatccacacgtccaacgcacagcaaacaccacgtcgaccctatcagctgcgtgctttctatgagtcgttgctgcataacaaaaaatttatttgcttattaattcatccggctcgtataatgtgtggagggcccaagttcacttaaaaaggagatcaacaatgaaagcaattttcgtactgaaacatcttaatcatgctaaggaggttttctatggagaaaaaaatcactggatataccaccgttgatatatcccaatggcatcgtaaagaacattttgaggcatttcagtcagttgctcaatgtacctataaccagaccgttcagctggatattacggcctttttaaagaccgtaaagaaaaataagcacaagttttatccggcctttattcacattcttgcccgcctgatgaatgctcatccggaattccgtatggcaatgaaagacggtgagctggtgatatgggatagtgttcacccttgttacaccgttttccatgagcaaactgaaacgttttcatcgctctggagtgaataccacgacgatttccggcagtttctacacatatattcgcaagatgtggcgtgttacggtgaaaacctggcctatttccctaaagggtttattgagaatatgtttttcgtctcagccaatccctgggtgagtttcaccagttttgatttaaacgtggccaatatggacaacttcttcgcccccgttttcaccatgggcaaatattatacgcaaggcgacaaggtgctgatgccgctggcgattcaggttcatcatgccgtttgtgatggcttccatgtcggcagaatgcttaatgaattacaacagtactgcgatgagtggcagggcggggcgtaaggatcggttgtcgagtaaggatctccaggcatcaaataaaacgaaaggctcagtcgaaagactgggcctttcgttttatctgttgtttgtcggtgaacgctctctactagagtcacactggctcaccttcgggtgggcctttctgcgtttataggatcctaactcgagtagggataacagggtaatttagttagttagttaactataacggtcctaaggtagcgaattaattaaagatgtgtataagagacaggatcctctagagtcgacctgcaggcatgcaagcttggcgtaatcatggtcatagctgtttcctgtgtgaaattgttatccgctcacaattccacacaacatacgagccggaagcataaagtgtaaagcctggggtgcctaatgagtgagctaactcacattaattgcgttgcgctcactgcccgctttccagtcgggaaacctgtcgtgccagctgcattaatgaatcggccaacgcgcggggagaggcggtttgcgtattgggcgctcttccgcttcctcgctcactgactcgctgcgctcggtcgttcggctgcggcgagcggtatcagctcactcaaaggcggtaatacggttatccacagaatcaggggataacgcaggaaagaacatgtgagcaaaaggccagcaaaaggccaggaaccgtaaaaaggccgcgttgctggcgtttttccataggctccgcccccctgacgagcatcacaaaaatcgacgctcaagtcagaggtggcgaaacccgacaggactataaagataccaggcgtttccccctggaagctccctcgtgcgctctcctgttccgaccctgccgcttaccggatacctgtccgcctttctcccttcgggaagcgtggcgctttctcatagctcacgctgtaggtatctcagttcggtgtaggtcgttcgctccaagctgggctgtgtgcacgaaccccccgttcagcccgaccgctgcgccttatccggtaactatcgtcttgagtccaacccggtaagacacgacttatcgccactggcagcagccactggtaacaggattagcagagcgaggtatgtaggcggtgctacagagttcttgaagtggtggcctaactacggctacactagaagaacagtatttggtatctgcgctctgctgaagccagttaccttcggaaaaagagttggtagctcttgatccggcaaacaaaccaccgctggtagcggtggtttttttgtttgcaagcagcagattacgcgcagaaaaaaaggatctcaagaagatcctttgatcttttctacggggtctgacgctcagtggaacgaaaactcacgttaagggattttggtcatgagattatcaaaaaggatcttcacctagatccttttaaattaaaaatgaagttttaaatcaatctaaagtatatatgagtaaacttggtctgacagttaccaatgcttaatcagtgaggcacctatctcagcgatctgtctatttcgttcatccatagttgcctgactccccgtcgtgtagataactacgatacgggagggcttaccatctggccccagtgctgcaatgataccgcgagacccacgctcaccggctccagatttatcagcaataaaccagccagccggaagggccgagcgcagaagtggtcctgcaactttatccgcctccatccagtctattaattgttgccgggaagctagagtaagtagttcgccagttaatagtttgcgcaacgttgttgccattgctacaggcatcgtggtgtcacgctcgtcgtttggtatggcttcattcagctccggttcccaacgatcaaggcgagttacatgatcccccatgttgtgcaaaaaagcggttagctccttcggtcctccgatcgttgtcagaagtaagttggccgcagtgttatcactcatggttatggcagcactgcataattctcttactgtcatgccatccgtaagatgcttttctgtgactggtgagtactcaaccaagtcattctgagaatagtgtatgcggcgaccgagttgctcttgcccggcgtcaatacgggataataccgcgccacatagcagaactttaaaagtgctcatcattggaaaacgttcttcggggcgaaaactctcaaggatcttaccgctgttgagatccagttcgatgtaacccactcgtgcacccaactgatcttcagcatcttttactttcaccagcgtttctgggtgagcaaaaacaggaaggcaaaatgccgcaaaaaagggaataagggcgacacggaaatgttgaatactcatactcttcctttttcaatattattgaagcatttatcagggttattgtctcatgagcggatacatatttgaatgtatttagaaaaataaacaaataggggttccgcgcacatttccccgaaaagtgccacctgacgtctaagaaaccattattatcatgacattaacctataaaaataggcgtatcacgaggccctttcgtc

SEQ ID NO: 4 - DNA, 4121 bp, Artificial Sequence
  Synthetic sequence
tcgcgcgtttcggtgatgacggtgaaaacctctgacacatgcagctcccggagacggtcacagcttgtctgtaagcggatgccgggagcagacaagcccgtcagggcgcgtcagcgggtgttggcgggtgtcggggctggcttaactatgcggcatcagagcagattgtactgagagtgcaccatatgcggtgtgaaataccgcacagatgcgtaaggagaaaataccgcatcaggcgccattcgccattcaggctgcgcaactgttgggaagggcgatcggtgcgggcctcttcgctattacgccagctggcgaaagggggatgtgctgcaaggcgattaagttgggtaacgccagggttttcccagtcacgacgttgtaaaacgacggccagtgaattcgagctcggtacccgggctgtctcttatacacatctgcggccgctagggataacagggtaatttagttagttagttaactataacggtcctaaggtagcgaaagatcttaagtaagtaagagtatacgtatatcggctaataacgtattaaggcgcttcggcgcctttttttatgggggtattttcatcccaatccacacgtccaacgcacagcaaacaccacgtcgaccctatcagctgcgtgctttctatgagtcgttgctgcataacaaaaaatttatttgcttattaattcatccggcttcgtataatgtgtggagggcccaagttcacttaaaaaggagatcaacaatgaaagcaattttcgtactgaaacatcttaatcatgctaaggaggttttctaatgattgaacaagatggattgcacgcaggttctccggccgcttgggtggagaggctattcggctatgactgggcacaacagacaatcggctgctctgatgccgccgtgttccggctgtcagcgcaggggcgcccggttctttttgtcaagaccgacctgtccggtgccctgaatgaactgcaggacgaggcagcgcggctatcgtggctggccacgacgggcgttccttgcgcagctgtgctcgacgttgtcactgaagcgggaagggactggctgctattgggcgaagtgccggggcaggatctcctgtcatctcaccttgctcctgccgagaaagtatccatcatggctgatgcaatgcggcggctgcatacgcttgatccggctacctgcccattcgaccaccaagcgaaacatcgcatcgagcgagcacgtactcggatggaagccggtcttgtcgatcaggatgatctggacgaagagcatcaggggctcgcgccagccgaactgttcgccaggctcaaggcgcgcatgcccgacggcgaggatctcgtcgtgacccatggcgatgcctgcttgccgaatatcatggtggaaaatggccgcttttctggattcatcgactgtggccggctgggtgtggcggaccgctatcaggacatagcgttggctacccgtgatattgctgaagagcttggcggcgaatgggctgaccgcttcctcgtgctttacggtatcgccgctcccgattcgcagcgcatcgccttctatcgccttcttgacgagttcttctaaggatcggttgtcgagtaaggatctccaggcatcaaataaaacgaaaggctcagtcgaaagactgggcctttcgttttatctgttgtttgtcggtgaacgctctctactagagtcacactggctcaccttcgggtgggcctttctgcgtttataggatcctaactcgagtagggataacagggtaatttagttagttagttaactataacggtcctaaggtagcgaattaattaaagatgtgtataagagacaggatcctctagagtcgacctgcaggcatgcaagcttggcgtaatcatggtcatagctgtttcctgtgtgaaattgttatccgctcacaattccacacaacatacgagccggaagcataaagtgtaaagcctggggtgcctaatgagtgagctaactcacattaattgcgttgcgctcactgcccgctttccagtcgggaaacctgtcgtgccagctgcattaatgaatcggccaacgcgcggggagaggcggtttgcgtattgggcgctcttccgcttcctcgctcactgactcgctgcgctcggtcgttcggctgcggcgagcggtatcagctcactcaaaggcggtaatacggttatccacagaatcaggggataacgcaggaaagaacatgtgagcaaaaggccagcaaaaggccaggaaccgtaaaaaggccgcgttgctggcgtttttccataggctccgcccccctgacgagcatcacaaaaatcgacgctcaagtcagaggtggcgaaacccgacaggactataaagataccaggcgtttccccctggaagctccctcgtgcgctctcctgttccgaccctgccgcttaccggatacctgtccgcctttctcccttcgggaagcgtggcgctttctcatagctcacgctgtaggtatctcagttcggtgtaggtcgttcgctccaagctgggctgtgtgcacgaaccccccgttcagcccgaccgctgcgccttatccggtaactatcgtcttgagtccaacccggtaagacacgacttatcgccactggcagcagccactggtaacaggattagcagagcgaggtatgtaggcggtgctacagagttcttgaagtggtggcctaactacggctacactagaagaacagtatttggtatctgcgctctgctgaagccagttaccttcggaaaaagagttggtagctcttgatccggcaaacaaaccaccgctggtagcggtggtttttttgtttgcaagcagcagattacgcgcagaaaaaaaggatctcaagaagatcctttgatcttttctacggggtctgacgctcagtggaacgaaaactcacgttaagggattttggtcatgagattatcaaaaaggatcttcacctagatccttttaaattaaaaatgaagttttaaatcaatctaaagtatatatgagtaaacttggtctgacagttaccaatgcttaatcagtgaggcacctatctcagcgatctgtctatttcgttcatccatagttgcctgactccccgtcgtgtagataactacgatacgggagggcttaccatctggccccagtgctgcaatgataccgcgagacccacgctcaccggctccagatttatcagcaataaaccagccagccggaagggccgagcgcagaagtggtcctgcaactttatccgcctccatccagtctattaattgttgccgggaagctagagtaagtagttcgccagttaatagtttgcgcaacgttgttgccattgctacaggcatcgtggtgtcacgctcgtcgtttggtatggcttcattcagctccggttcccaacgatcaaggcgagttacatgatcccccatgttgtgcaaaaaagcggttagctccttcggtcctccgatcgttgtcagaagtaagttggccgcagtgttatcactcatggttatggcagcactgcataattctcttactgtcatgccatccgtaagatgcttttctgtgactggtgagtactcaaccaagtcattctgagaatagtgtatgcggcgaccgagttgctcttgcccggcgtcaatacgggataataccgcgccacatagcagaactttaaaagtgctcatcattggaaaacgttcttcggggcgaaaactctcaaggatcttaccgctgttgagatccagttcgatgtaacccactcgtgcacccaactgatcttcagcatcttttactttcaccagcgtttctgggtgagcaaaaacaggaaggcaaaatgccgcaaaaaagggaataagggcgacacggaaatgttgaatactcatactcttcctttttcaatattattgaagcatttatcagggttattgtctcatgagcggatacatatttgaatgtatttagaaaaataaacaaataggggttccgcgcacatttccccgaaaagtgccacctgacgtctaagaaaccattattatcatgacattaacctataaaaataggcgtatcacgaggccctttcgtc

SEQ ID NO: 5 - DNA, 1298 bp, Artificial Sequence
  Synthetic sequence
ctgtctcttatacacatctgcggccgctagggataacagggtaatttagttagttagttaactataacggtcctaaggtagcgaaagatcttaagtaagtaagagtatacgtatatcggctaataacgtattaaggcgcttcggcgcctttttttatgggggtattttcatcccaatccacacgtccaacgcacagcaaacaccacgtcgaccctatcagctgcgtgctttctatgagtcgttgctgcataacaaaaaatttatttgcttattaattcatccggctcgtataatgtgtggagggcccaagttcacttaaaaaggagatcaacaatgaaagcaattttcgtactgaaacatcttaatcatgctaaggaggttttctatggagaaaaaaatcactggatataccaccgttgatatatcccaatggcatcgtaaagaacattttgaggcatttcagtcagttgctcaatgtacctataaccagaccgttcagctggatattacggcctttttaaagaccgtaaagaaaaataagcacaagttttatccggcctttattcacattcttgcccgcctgatgaatgctcatccggaattccgtatggcaatgaaagacggtgagctggtgatatgggatagtgttcacccttgttacaccgttttccatgagcaaactgaaacgttttcatcgctctggagtgaataccacgacgatttccggcagtttctacacatatattcgcaagatgtggcgtgttacggtgaaaacctggcctatttccctaaagggtttattgagaatatgtttttcgtctcagccaatccctgggtgagtttcaccagttttgatttaaacgtggccaatatggacaacttcttcgcccccgttttcaccatgggcaaatattatacgcaaggcgacaaggtgctgatgccgctggcgattcaggttcatcatgccgtttgtgatggcttccatgtcggcagaatgcttaatgaattacaacagtactgcgatgagtggcagggcggggcgtaaggatcggttgtcgagtaaggatctccaggcatcaaataaaacgaaaggctcagtcgaaagactgggcctttcgttttatctgttgtttgtcggtgaacgctctctactagagtcacactggctcaccttcgggtgggcctttctgcgtttataggatcctaactcgagtagggataacagggtaatttagttagttagttaactataacggtcctaaggtagcgaattaattaaagatgtgtataagagacag

SEQ ID NO: 6 - DNA, 1435 bp, Artificial Sequence
  Synthetic sequence
ctgtctcttatacacatctgcggccgctagggataacagggtaatttagttagttagttaactataacggtcctaaggtagcgaaagatcttaagtaagtaagagtatacgtatatcggctaataacgtattaaggcgcttcggcgcctttttttatgggggtattttcatcccaatccacacgtccaacgcacagcaaacaccacgtcgaccctatcagctgcgtgctttctatgagtcgttgctgcataacaaaaaatttatttgcttattaattcatccggcttcgtataatgtgtggagggcccaagttcacttaaaaaggagatcaacaatgaaagcaattttcgtactgaaacatcttaatcatgctaaggaggttttctaatgattgaacaagatggattgcacgcaggttctccggccgcttgggtggagaggctattcggctatgactgggcacaacagacaatcggctgctctgatgccgccgtgttccggctgtcagcgcaggggcgcccggttctttttgtcaagaccgacctgtccggtgccctgaatgaactgcaggacgaggcagcgcggctatcgtggctggccacgacgggcgttccttgcgcagctgtgctcgacgttgtcactgaagcgggaagggactggctgctattgggcgaagtgccggggcaggatctcctgtcatctcaccttgctcctgccgagaaagtatccatcatggctgatgcaatgcggcggctgcatacgcttgatccggctacctgcccattcgaccaccaagcgaaacatcgcatcgagcgagcacgtactcggatggaagccggtcttgtcgatcaggatgatctggacgaagagcatcaggggctcgcgccagccgaactgttcgccaggctcaaggcgcgcatgcccgacggcgaggatctcgtcgtgacccatggcgatgcctgcttgccgaatatcatggtggaaaatggccgcttttctggattcatcgactgtggccggctgggtgtggcggaccgctatcaggacatagcgttggctacccgtgatattgctgaagagcttggcggcgaatgggctgaccgcttcctcgtgctttacggtatcgccgctcccgattcgcagcgcatcgccttctatcgccttcttgacgagttcttctaaggatcggttgtcgagtaaggatctccaggcatcaaataaaacgaaaggctcagtcgaaagactgggcctttcgttttatctgttgtttgtcggtgaacgctctctactagagtcacactggctcaccttcgggtgggcctttctgcgtttataggatcctaactcgagtagggataacagggtaatttagttagttagttaactataacggtcctaaggtagcgaattaattaaagatgtgtataagagacag

SEQ ID NO: 7 - DNA, 20 bp, Artificial Sequence
  Synthetic sequence
  Misc_feature (1)..(1): There is a phosphate group at the 5' end
ccgtccatgaagggttcgat

SEQ ID NO: 8 - DNA, 20 bp, Artificial Sequence
  Synthetic sequence
  Misc_feature (1)..(1): There is a phosphate group at the 5' end
acgaatctgccgttgccata

SEQ ID NO: 9 - DNA, 60 bp, Artificial Sequence
  Synthetic sequence
  misc_feature (21)..(40): n is a, c, g, or t
ccgtccatgaagggttcgatnnnnnnnnnnnnnnnnnnnntatggcaacggcagattcgt

SEQ ID NO: 10 - DNA, 20 bp, Artificial Sequence
  Synthetic sequence
ccgtccatgaagggttcgat

SEQ ID NO: 11 - DNA, 20 bp, Artificial Sequence
  Synthetic sequence
acgaatctgccgttgccata

SEQ ID NO: 12 - DNA, 20 bp, Artificial Sequence
  Synthetic sequence
  Misc_feature (1)..(1): There is a phosphate group at the 5' end
ccgtccatgaagggttcgat

SEQ ID NO: 13 - DNA, 20 bp, Artificial Sequence
  Synthetic sequence
  Misc_feature (1)..(1): There is a phosphate group at the 5' end
acgaatctgccgttgccata

SEQ ID NO: 14 - DNA, 60 bp, Artificial Sequence; identical to SEQ ID NO: 9
  Synthetic sequence
  misc_feature (21)..(40): n is a, c, g, or t

SEQ ID NO: 15 - DNA, 27 bp, Artificial Sequence
  Synthetic sequence
ctgtctcttatacacatctgcggccgc

SEQ ID NO: 16 - DNA, 27 bp, Artificial Sequence
  Synthetic sequence
ctgtctcttatacacatctgcggccgc

SEQ ID NO: 17 - DNA, 20 bp, Artificial Sequence
  Synthetic Sequence
ccgtccatgaagggttcgat

SEQ ID NO: 18 - DNA, 20 bp, Artificial Sequence
  Synthetic Sequence
acgaatctgccgttgccata

SEQ ID NO: 19 - DNA, 60 bp, Artificial Sequence; identical to SEQ ID NO: 9
  Synthetic Sequence
  Misc_feature (21)..(40): n is a, c, g, or t

SEQ ID NO: 20 - DNA, 20 bp, Artificial Sequence
  Synthetic Sequence
gagacagggcaagaaacagc

SEQ ID NO: 21 - DNA, 20 bp, Artificial Sequence
  Synthetic Sequence
aacaggcggccttaactgta

SEQ ID NO: 22 - DNA, 22 bp, Artificial Sequence
  Synthetic Sequence
tcctgctcaacttcctgtcgag

SEQ ID NO: 23 - DNA, 22 bp, Artificial Sequence
  Synthetic Sequence
caggtcaaacctcctaggaatg

SEQ ID NO: 24 - DNA, 1844 bp, Artificial Sequence
  Synthetic Sequence
gcggccgcaggcgattaagttgggtaacgccagggttttcccagtcacggcgcgccttgtaaaacgacggccagtgaattcgagctcggtacccggaggcctccacctgggtcttggaatgtgtcccccgaggggtgatgactacctcagttggatctccacaggtcacagtgacacaagataaccaagacacctcccaaggctaccacaatgggccgccctccacgtgcacatggccggaggaactgccatgtcggaggtgcaagcacacctgcgcatcagagtccttggtgtggagggagggaccagcgcagcttccagccatccacctgatgaacagaacctagggaaagccccagttctacttacaccaggaaaggctggaagggctaatttggtcccaaaaaagacaagagatccttgatctgtggatctaccacacacaaggctacttccctgattggcagaactacacaccagggccagggatcagatatccactgacctttggatggtgcttcaagttagtaccagttgaaccagagcaagtagaagaggccaatgaaggagagaacaacagcttgttacaccctatgagccagcatgggatggaggacccggagggagaagtattagtgtggaagtttgacagcctcctagcatttcgtcacatggcccgagagctgcatccggagtactacaaagactgctgacatcgagctttctacaagggactttccgctggggactttccagggaggtgtggcctgggcgggactggggagtggcgagccctcagatgctacatataagcagctgctttttgcctgtactgggtctctctggttagaccagatctgagcctgggagctctctggctaactagggaacccactgcttaagcctcaataaagcttgccttgagtgctcaaagtagtgtgtgcccgtctgttgtgtgactctggtaactagagatccctcagacccttttagtcagtgtggaaaatctctagcagtggcgcccgaacagggacttgaaagcgaaagtaaagccagaggagatctctcgacgcaggactcggcttgctgaagcgcgcacggcaagaggcgaggggcggcgactggtgagtacgccaaaaattttgactagcggaggctagaaggagagagatgggtgcgagagcgtcggtattaagcgggggagaattagataaatgggaaaaaattcggttaaggccagggggaaagaaacaatataaactaaaacatatagtatgggcaagcagggagctagaacgattcgcagttaatcctggccttttagagacatcagaaggctgtagacaaatactgggacagctacaaccatcccttcagacaggatcagaagaacttagatcattatataatacaatagcagtcctctattgtgtgcatcaaaggatagatgtaaaagacaccaaggaagccttagataagatagaggaagagcaaaacaaaagtaagaaaaaggcacagcaagcagcagctgacacaggaaacaacagccaggtcagccaaaattaccctatagtgcagaacctccaggggcaaatggtacatcaggccatatcacctagaactttaaatgcatgggtaaaagtagtagaagagaaggctttcagcccagaagtaatacccatgttttcagcattatcagaaggagccaccccacaagatttaaataccatgctaaacacagtggggggacatcaagcagccatgcaaatgttaaaagagaccatcaatgaggaagctgcagaatgggatagattgcatccagtgcatgcagggcctgcggccgc

SEQ ID NO: 25 - DNA, 1904 bp, Artificial Sequence
  Synthetic Sequence
gcggccgctgcagaatgggatagattgcatccagtgcatgcagggcctattgcaccaggccagatgagagaaccaaggggaagtgacatagcaggaactactagtacccttcaggaacaaataggatggatgacacataatccacctatcccagtaggagaaatctataaaagatggataatcctgggattaaataaaatagtaagaatgtatagccctaccagcattctggacataagacaaggaccaaaggaaccctttagagactatgtagaccgattctataaaactctaagagccgagcaagcttcacaagaggtaaaaaattggatgacagaaaccttgttggtccaaaatgcgaacccagattgtaagactattttaaaagcattgggaccaggagcgacactagaagaaatgatgacagcatgtcagggagtggggggacccggccataaagcaagagttttggctgaagcaatgagccaagtaacaaatccagctaccataatgatacagaaaggcaattttaggaaccaaagaaagactgttaagtgtttcaattgtggcaaagaagggcacatagccaaaaattgcagggcccctaggaaaaagggctgttggaaatgtggaaaggaaggacaccaaatgaaagattgtactgagagacaggctaattttttagggaagatctggccttcccacaagggaaggccagggaattttcttcagagcagaccagagccaacagccccaccagaagagagcttcaggtttggggaagagacaacaactccctctcagaagcaggagccgatagacaaggaactgtatcctttagcttccctcagatcactctttggcagcgacccctcgtcacaataaagataggggggcaattaaaggaagctctattagatacaggagcagatgatacagtattagaagaaatgaatttgccaggaagatggaaaccaaaaatgatagggggaattggaggttttatcaaagtaagacagtatgatcagatactcatagaaatctgcggacataaagctataggtacagtattagtaggacctacacctgtcaacataattggaagaaatctgttgactcagattggctgcactttaaattttcccattagtcctattgagactgtaccagtaaaattaaagccaggaatggatggcccaaaagttaaacaatggccattgacagaagaaaaaataaaagcattagtagaaatttgtacagaaatggaaaaggaaggaaaaatttcaaaaattgggcctgaaaatccatacaatactccagtatttgccataaagaaaaaagacagtactaaatggagaaaattagtagatttcagagaacttaataagagaactcaagatttctgggaagttcaattaggaataccacatcctgcagggttaaaacagaaaaaatcagtaacagtactggatgtgggcgatgcatatttttcagttcccttagataaagacttcaggaagtatactgcatttaccatacctagtataaacaatgagacaccagggattagatatcagtacaatgtgcttccacagggatggaaaggatcaccagcaatattccagtgtagcatgacaaaaatcttagagccttttagaaaacaaaatccagacatagtcatctatcaatacatggatgatttgtatgtaggatctgacttagaaatagggcagcatagaacaaaaatagaggaactgagacaacatctgttgaggtggggatttaccacaccagacaaaaaacatcagaaagaacctccattcctttggatgggttatgaactccatcctgataaatggacagtacagcctatagtgctgccagaaaaggacagctgcggccgc

SEQ ID NO: 26 - DNA, 935 bp, Artificial Sequence
  Synthetic Sequence
tgcagaatgggatagattgcatccagtgcatgcagggcctattgcaccaggccagatgagagaaccaaggggaagtgacatagcaggaactactagtacccttcaggaacaaataggatggatgacacataatccacctatcccagtaggagaaatctataaaagatggataatcctgggattaaataaaatagtaagaatgtatagccctaccagcattcaacgaatctgccgttgccatatgatccggccatgggttcaaatcgaacccttcatggacggtgtagaaatttgtacagaaatggaaaaggaaggaaaaatttcaaaaattgggcctgaaaatccatacaatactccagtatttgccataaagaaaaaagacagtactaaatggagaaaattagtagatttcagagaacttaataagagaactcaagatttctgggaagttcaattaggaataccacatcctgcagggttaaaacagaaaaaatcagtaacagtactggatgtgggcgatgcatatttttcagttcccttagataaagacttcaggaagtatactgcatttaccatacctagtataaacaatgagacaccagggattagatatcagtacaatgtgcttccacagggatggaaaggatcaccagcaatattccagtgtagcatgacaaaaatcttagagccttttagaaaacaaaatccagacatagtcatctatcaatacatggatgatttgtatgtaggatctgacttagaaatagggcagcatagaacaaaaatagaggaactgagacaacatctgttgaggtggggatttaccacaccagacaaaaaacatcagaaagaacctccattcctttggatgggttatgaactccatcctgataaatggacagtacagcctatagtgctgccagaaaaggacagct

SEQ ID NO: 27 - DNA, 590 bp, Artificial Sequence
  Synthetic Sequence
tgcagaatgggatagattgcatccagtgcatgcagggcctaccgtccatgaagggttcgattggacccgcccggacgctcatatggcaacggcagattcgttagttcaattaggaataccacatcctgcagggttaaaacagaaaaaatcagtaacagtactggatgtgggcgatgcatatttttcagttcccttagataaagacttcaggaagtatactgcatttaccatacctagtataaacaatgagacaccagggattagatatcagtacaatgtgcttccacagggatggaaaggatcaccagcaatattccagtgtagcatgacaaaaatcttagagccttttagaaaacaaaatccagacatagtcatctatcaatacatggatgatttgtatgtaggatctgacttagaaatagggcagcatagaacaaaaatagaggaactgagacaacatctgttgaggtggggatttaccacaccagacaaaaaacatcagaaagaacctccattcctttggatgggttatgaactccatcctgataaatggacagtacagcctatagtgctgccagaaaaggacagct

SEQ ID NO: 28 - DNA, 404 bp, Artificial Sequence
  Synthetic Sequence
tgcagaatgggatagattgcatccagtgcatgcaccgtccatgaagggttcgatcaggcagctcaagaaacacgtatggcaacggcagattcgttttccacagggatggaaaggatcaccagcaatattccagtgtagcatgacaaaaatcttagagccttttagaaaacaaaatccagacatagtcatctatcaatacatggatgatttgtatgtaggatctgacttagaaatagggcagcatagaacaaaaatagaggaactgagacaacatctgttgaggtggggatttaccacaccagacaaaaaacatcagaaagaacctccattcctttggatgggttatgaactccatcctgataaatggacagtacagcctatagtgctgccagaaaaggacagct

SEQ ID NO: 29 - DNA, 1043 bp, Artificial Sequence
  Synthetic Sequence
tgcagaatgggatagattgcatccagtgcatgcagggcctattgcaccaggccaaacgaatctgccgttgccatatgcagacattacactgtcgaatcgaacccttcatggacggtggaaaccaaaaatgatagggggaattggaggttttatcaaagtaagacagtatgatcagatactcatagaaatctgcggacataaagctataggtacagtattagtaggacctacacctgtcaacataattggaagaaatctgttgactcagattggctgcactttaaattttcccattagtcctattgagactgtaccagtaaaattaaagccaggaatggatggcccaaaagttaaacaatggccattgacagaagaaaaaataaaagcattagtagaaatttgtacagaaatggaaaaggaaggaaaaatttcaaaaattgggcctgaaaatccatacaatactccagtatttgccataaagaaaaaagacagtactaaatggagaaaattagtagatttcagagaacttaataagagaactcaagatttctgggaagttcaattaggaataccacatcctgcagggttaaaacagaaaaaatcagtaacagtactggatgtgggcgatgcatatttttcagttcccttagataaagacttcaggaagtatactgcatttaccatacctagtataaacaatgagacaccagggattagatatcagtacaatgtgcttccacagggatggaaaggatcaccagcaatattccagtgtagcatgacaaaaatcttagagccttttagaaaacaaaatccagacatagtcatctatcaatacatggatgatttgtatgtaggatctgacttagaaatagggcagcatagaacaaaaatagaggaactgagacaacatctgttgaggtggggatttaccacaccagacaaaaaacatcagaaagaacctccattcctttggatgggttatgaactccatcctgataaatggacagtacagcctatagtgctgccagaaaaggacagct

SEQ ID NO: 30 - DNA, 1126 bp, Artificial Sequence
  Synthetic Sequence
tgcagaatgggatagattgcatccagtgcatgcagggcctattgcaccaggccagatgagagaaccaagaccgtccatgaagggttcgatggggggcggcgattacttgttatggcaacggcagattcgttaaaggaagctctattagatacaggagcagatgatacagtattagaagaaatgaatttgccaggaagatggaaaccaaaaatgatagggggaattggaggttttatcaaagtaagacagtatgatcagatactcatagaaatctgcggacataaagctataggtacagtattagtaggacctacacctgtcaacataattggaagaaatctgttgactcagattggctgcactttaaattttcccattagtcctattgagactgtaccagtaaaattaaagccaggaatggatggcccaaaagttaaacaatggccattgacagaagaaaaaataaaagcattagtagaaatttgtacagaaatggaaaaggaaggaaaaatttcaaaaattgggcctgaaaatccatacaatactccagtatttgccataaagaaaaaagacagtactaaatggagaaaattagtagatttcagagaacttaataagagaactcaagatttctgggaagttcaattaggaataccacatcctgcagggttaaaacagaaaaaatcagtaacagtactggatgtgggcgatgcatatttttcagttcccttagataaagacttcaggaagtatactgcatttaccatacctagtataaacaatgagacaccagggattagatatcagtacaatgtgcttccacagggatggaaaggatcaccagcaatattccagtgtagcatgacaaaaatcttagagccttttagaaaacaaaatccagacatagtcatctatcaatacatggatgatttgtatgtaggatctgacttagaaatagggcagcatagaacaaaaatagaggaactgagacaacatctgttgaggtggggatttaccacaccagacaaaaaacatcagaaagaacctccattcctttggatgggttatgaactccatcctgataaatggacagtacagcctatagtgctgccagaaaaggacagct

SEQ ID NO: 31 - DNA, 1091 bp, Artificial Sequence
  Synthetic Sequence
tgcagaatgggatagattgcatccagtgcatgcagggcctattgcaccaggccaaccgtccatgaagggttcgatgagctgcagggcatgttatatatggcaacggcagattcgttcaggagcagatgatacagtattagaagaaatgaatttgccaggaagatggaaaccaaaaatgatagggggaattggaggttttatcaaagtaagacagtatgatcagatactcatagaaatctgcggacataaagctataggtacagtattagtaggacctacacctgtcaacataattggaagaaatctgttgactcagattggctgcactttaaattttcccattagtcctattgagactgtaccagtaaaattaaagccaggaatggatggcccaaaagttaaacaatggccattgacagaagaaaaaataaaagcattagtagaaatttgtacagaaatggaaaaggaaggaaaaatttcaaaaattgggcctgaaaatccatacaatactccagtatttgccataaagaaaaaagacagtactaaatggagaaaattagtagatttcagagaacttaataagagaactcaagatttctgggaagttcaattaggaataccacatcctgcagggttaaaacagaaaaaatcagtaacagtactggatgtgggcgatgcatatttttcagttcccttagataaagacttcaggaagtatactgcatttaccatacctagtataaacaatgagacaccagggattagatatcagtacaatgtgcttccacagggatggaaaggatcaccagcaatattccagtgtagcatgacaaaaatcttagagccttttagaaaacaaaatccagacatagtcatctatcaatacatggatgatttgtatgtaggatctgacttagaaatagggcagcatagaacaaaaatagaggaactgagacaacatctgttgaggtggggatttaccacaccagacaaaaaacatcagaaagaacctccattcctttggatgggttatgaactccatcctgataaatggacagtacagcctatagtgctgccagaaaaggacagct

SEQ ID NO: 32 - DNA, 1155 bp, Artificial Sequence
  Synthetic Sequence
tgcagaatgggatagattgcatccagtgcatgcagggcctattgcaccaggccagatgagagaaccaaggggaagtgacatagcaggaactactagtacccttcaggaacaaataggatggatgacacataatccacctatcccaaccgtccatgaagggttcgatggcgaccctcggccgtggactatggcaacggcagattcgttaaatgaatttgccaggaagatggaaaccaaaaatgatagggggaattggaggttttatcaaagtaagacagtatgatcagatactcatagaaatctgcggacataaagctataggtacagtattagtaggacctacacctgtcaacataattggaagaaatctgttgactcagattggctgcactttaaattttcccattagtcctattgagactgtaccagtaaaattaaagccaggaatggatggcccaaaagttaaacaatggccattgacagaagaaaaaataaaagcattagtagaaatttgtacagaaatggaaaaggaaggaaaaatttcaaaaattgggcctgaaaatccatacaatactccagtatttgccataaagaaaaaagacagtactaaatggagaaaattagtagatttcagagaacttaataagagaactcaagatttctgggaagttcaattaggaataccacatcctgcagggttaaaacagaaaaaatcagtaacagtactggatgtgggcgatgcatatttttcagttcccttagataaagacttcaggaagtatactgcatttaccatacctagtataaacaatgagacaccagggattagatatcagtacaatgtgcttccacagggatggaaaggatcaccagcaatattccagtgtagcatgacaaaaatcttagagccttttagaaaacaaaatccagacatagtcatctatcaatacatggatgatttgtatgtaggatctgacttagaaatagggcagcatagaacaaaaatagaggaactgagacaacatctgttgaggtggggatttaccacaccagacaaaaaacatcagaaagaacctccattcctttggatgggttatgaactccatcctgataaatggacagtacagcctatagtgctgccagaaaaggacagct

SEQ ID NO: 33 - DNA, 1789 bp, Artificial Sequence
  Synthetic Sequence
gcggccgctggacagtacagcctatagtgctgccagaaaaggacagctggactgtcaatgacatacagaaattagtgggaaaattgaattgggcaagtcagatttatgcagggattaaagtaaggcaattatgtaaacttcttaggggaaccaaagcactaacagaagtagtaccactaacagaagaagcagagctagaactggcagaaaacagggagattctaaaagaaccggtacatggagtgtattatgacccatcaaaagacttaatagcagaaatacagaagcaggggcaaggccaatggacatatcaaatttatcaagagccatttaaaaatctgaaaacaggaaagtatgcaagaatgaagggtgcccacactaatgatgtgaaacaattaacagaggcagtacaaaaaatagccacagaaagcatagtaatatggggaaagactcctaaatttaaattacccatacaaaaggaaacatgggaagcatggtggacagagtattggcaagccacctggattcctgagtgggagtttgtcaatacccctcccttagtgaagttatggtaccagttagagaaagaacccataataggagcagaaactttctatgtagatggggcagccaatagggaaactaaattaggaaaagcaggatatgtaactgacagaggaagacaaaaagttgtccccctaacggacacaacaaatcagaagactgagttacaagcaattcatctagctttgcaggattcgggattagaagtaaacatagtgacagactcacaatatgcattgggaatcattcaagcacaaccagataagagtgaatcagagttagtcagtcaaataatagagcagttaataaaaaaggaaaaagtctacctggcatgggtaccagcacacaaaggaattggaggaaatgaacaagtagataaattggtcagtgctggaatcaggaaagtactatttttagatggaatagataaggcccaagaagaacatgagaaatatcacagtaattggagagcaatggctagtgattttaacctaccacctgtagtagcaaaagaaatagtagccagctgtgataaatgtcagctaaaaggggaagccatgcatggacaagtagactgtagcccaggaatatggcagctagattgtacacatttagaaggaaaagttatcttggtagcagttcatgtagccagtggatatatagaagcagaagtaattccagcagagacagggcaagaaacagcatacttcctcttaaaattagcaggaagatggccagtaaaaacagtacatacagacaatggcagcaatttcaccagtactacagttaaggccgcctgttggtgggcggggatcaagcaggaatttggcattccctacaatccccaaagtcaaggagtaatagaatctatgaataaagaattaaagaaaattataggacaggtaagagatcaggctgaacatcttaagacagcagtacaaatggcagtattcatccacaattttaaaagaaaaggggggattggggggtacagtgcaggggaaagaatagtagacataatagcaacagacatacaaactaaagaattacaaaaacaaattacaaaaattcaaaattttcgggtttattacagggacagcagagatccagtttggaaaggaccagcaaagctcctctggaaaggtgaaggggcagtagtaatacaagatggcgcgccagtgtaaagcctggggtgcctaatgagtgagctaactcacgcggccgc

SEQ ID NO: 34 - DNA, 849 bp, Artificial Sequence
  Synthetic Sequence
tggacagtacagcctatagtgctgccagaaaaggacagctggactgtcaatgacatacagaaattagtgggaaaattgaattgggcaagtcagatttatgcagggattaaagtaaggcaattatgtaaacttcttaggggaaccaaagcactaacagaagtagtaccactaacagaagaagcagagctagaactggcagaaaacagggagattctaaaagaaccggtacatggagtgtattatgacccatcaaaagacttaatagcagaaatacagaagcaggggcaaggccaatggacatatcaaatttatcaagagccatttaaaaatctgaaaacaggaaagtatgcaagaatgaacgaatctgccgttgccatatacagcatctgaacaagctgatcgaacccttcatggacggttaaggccgcctgttggtgggcggggatcaagcaggaatttggcattccctacaatccccaaagtcaaggagtaatagaatctatgaataaagaattaaagaaaattataggacaggtaagagatcaggctgaacatcttaagacagcagtacaaatggcagtattcatccacaattttaaaagaaaaggggggattggggggtacagtgcaggggaaagaatagtagacataatagcaacagacatacaaactaaagaattacaaaaacaaattacaaaaattcaaaattttcgggtttattacagggacagcagagatccagtttggaaaggaccagcaaagctcctctggaaaggtgaaggggcagtagtaatacaagatggcgcgccagtgtaaagcctggggtgcctaatgagtgagctaactcac

SEQ ID NO: 35 - DNA, 1633 bp, Artificial Sequence
  Synthetic Sequence
aggcgattaagttgggtaacgccagggttttcccagtcacggcgcgccgctcctctggaaaggtgaaggggcagtagtaatacaagataatagtgacataaaagtagtgccaagaagaaaagcaaagatcatcagggattatggaaaacagatggcaggtgatgattgtgtggcaagtagacaggatgaggattaacacatggaaaagattagtaaaacaccatatgtatatttcaaggaaagctaaggactggttttatagacatcactatgaaagtactaatccaaaaataagttcagaagtacacatcccactaggggatgctaaattagtaataacaacatattggggtctgcatacaggagaaagagactggcatttgggtcagggagtctccatagaatggaggaaaaagagatatagcacacaagtagaccctgacctagcagaccaactaattcatctgcactattttgattgtttttcagaatctgctataagaaataccatattaggacgtatagttagtcctaggtgtgaatatcaagcaggacataacaaggtaggatctctacagtacttggcactagcagcattaataaaaccaaaacagataaagccacctttgcctagtgttaggaaactgacagaggacagatggaacaagccccagaagaccaagggccacagagggagccatacaatgaatggacactagagcttttagaggaacttaagagtgaagctgttagacattttcctaggatatggctccataacttaggacaacatatctatgaaacttacggggatacttgggcaggagtggaagccataataagaattctgcaacaactgctgtttatccatttcagaattgggtgtcgacatagcagaataggcgttactcgacagaggagagcaagaaatggagccagtagatcctagactagagccctggaagcatccaggaagtcagcctaaaactgcttgtaccaattgctattgtaaaaagtgttgctttcattgccaagtttgtttcatgacaaaagccttaggcatctcctatggcaggaagaagcggagacagcgacgaagagctcatcagaacagtcagactcatcaagcttctctatcaaagcagtaagtagtacatgtaatgcaacctataatagtagcaatagtagcattagtagtagcaataataatagcaatagttgtgtggtccatagtaatcatagaatataggaaaatattaagacaaagaaaaatagacaggttaattgatagactaatagaaagagcagaagacagtggcaatgagagtgaaggagaagtatcagcacttgtggagatgggggtggaaatggggcaccatgctccttgggatattgatgatctgtagtgctacagaaaaattgtgggtcacagtctattatggggtacctgtgtggaaggaagcaaccaccactctattttgtgcatcagatgctaaagcatatgatacagaggtacataatgtttgggccacacatgcctgtgtacccacagaccccaacccacaagaagtagtattggtaaatgggcgcgccagtgtaaagcctggggtgcctaatgagtgagctaactcac

SEQ ID NO: 36 - DNA, 614 bp, Artificial Sequence
  Synthetic Sequence
gctcctctggaaaggtgaaggggcagtagtaatacaagataatagtgacataaaagtagtgccaagaagaaaagcaaagatcatcagggattatggaaaacagatggcaggtgatgattgtgtggcccgtccatgaagggttcgattcttgaacagcgcggtctgttatggcaacggcagattcgtttaatgcaacctataatagtagcaatagtagcattagtagtagcaataataatagcaatagttgtgtggtccatagtaatcatagaatataggaaaatattaagacaaagaaaaatagacaggttaattgatagactaatagaaagagcagaagacagtggcaatgagagtgaaggagaagtatcagcacttgtggagatgggggtggaaatggggcaccatgctccttgggatattgatgatctgtagtgctacagaaaaattgtgggtcacagtctattatggggtacctgtgtggaaggaagcaaccaccactctattttgtgcatcagatgctaaagcatatgatacagaggtacataatgtttgggccacacatgcctgtgtacccacagaccccaacccacaagaagtagtattggtaaatg

SEQ ID NO: 37 - DNA, 649 bp, Artificial Sequence
  Synthetic Sequence
aggcgattaagttgggtaacgccagggttttcccagtcacggcgcgccgctcctctggaaaggtgaaggggcagtagtaatacaagataatagtgacataaaagtagtgccaagaagaaaagcaaagatcatcagggattatggaaaacagatggcaggtgatgattgtgtggctaatgcaacctataatagtagcaatagtagcattagtagtagcaataataatagcaatagttgtgtggtccatagtaatcatagaatataggaaaatattaagacaaagaaaaatagacaggttaattgatagactaatagaaagagcagaagacagtggcaatgagagtgaaggagaagtatcagcacttgtggagatgggggtggaaatggggcaccatgctccttgggatattgatgatctgtagtgctacagaaaaattgtgggtcacagtctattatggggtacctgtgtggaaggaagcaaccaccactctattttgtgcatcagatgctaaagcatatgatacagaggtacataatgtttgggccacacatgcctgtgtacccacagaccccaacccacaagaagtagtattggtaaatgggcgcgccagtgtaaagcctggggtgcctaatgagtgagctaactcac

SEQ ID NO: 38 - DNA, 607 bp, Artificial Sequence
  Synthetic Sequence
aggcgattaagttgggtaacgccagggttttcccagtcacggcgcgccgctcctctggaaaggtgaaggggcagtagtaatacaagataatagtgacataaaagtagtgccaagaagaaaagcaaagatcatcagggattatggaaaacagatggcaggtgatgattgtgtaccgtccatgaagggttcgatgatcggtcgtcgcagcggtctatggcaacggcagattcgttagacaaagaaaaatagacaggttaattgatagactaatagaaagagcagaagacagtggcaatgagagtgaaggagaagtatcagcacttgtggagatgggggtggaaatggggcaccatgctccttgggatattgatgatctgtagtgctacagaaaaattgtgggtcacagtctattatggggtacctgtgtggaaggaagcaaccaccactctattttgtgcatcagatgctaaagcatatgatacagaggtacataatgtttgggccacacatgcctgtgtacccacagaccccaacccacaagaagtagtattggtaaatgggcgcgccagtgtaaagcctggggtgcctaatgagtgagctaactcac

SEQ ID NO: 39 - DNA, 389 bp, Artificial Sequence
  Synthetic Sequence
gctcctctggaaaggtgaaggggcagtagtaatacaagataatagtgacataaaagtagtgccaagaagaaaagcaaagatcatcagggattaaccgtccatgaagggttcgattatctgtagccaacattcgatatggcaacggcagattcgttggagatgggggtggaaatggggcaccatgctccttgggatattgatgatctgtagtgctacagaaaaattgtgggtcacagtctattatggggtacctgtgtggaaggaagcaaccaccactctattttgtgcatcagatgctaaagcatatgatacagaggtacataatgtttgggccacacatgcctgtgtacccacagaccccaacccacaagaagtagtattggtaaatg

SEQ ID NO: 40 - DNA, 2125 bp, Artificial Sequence
  Synthetic Sequence
gcggccgcaggcgattaagttgggtaacgccagggttttcccagtcacggcgcgcccccacagaccccaacccacaagaagtagtattggtaaatgtgacagaaaattttaacatgtggaaaaatgacatggtagaacagatgcatgaggatataatcagtttatgggatcaaagcctaaagccatgtgtaaaattaaccccactctgtgttagtttaaagtgcactgatttgaagaatgatactaataccaatagtagtagcgggagaatgataatggagaaaggagagataaaaaactgctctttcaatatcagcacaagcataagagataaggtgcagaaagaatatgcattcttttataaacttgatatagtaccaatagataataccagctataggttgataagttgtaacacctcagtcattacacaggcctgtccaaaggtatcctttgagccaattcccatacattattgtgccccggctggttttgcgattctaaaatgtaataataagacgttcaatggaacaggaccatgtacaaatgtcagcacagtacaatgtacacatggaatcaggccagtagtatcaactcaactgctgttaaatggcagtctagcagaagaagatgtagtaattagatctgccaatttcacagacaatgctaaaaccataatagtacagctgaacacatctgtagaaattaattgtacaagacccaacaacaatacaagaaaaagtatccgtatccagaggggaccagggagagcatttgttacaataggaaaaataggaaatatgagacaagcacattgtaacattagtagagcaaaatggaatgccactttaaaacagatagctagcaaattaagagaacaatttggaaataataaaacaataatctttaagcaatcctcaggaggggacccagaaattgtaacgcacagttttaattgtggaggggaatttttctactgtaattcaacacaactgtttaatagtacttggtttaatagtacttggagtactgaagggtcaaataacactgaaggaagtgacacaatcacactcccatgcagaataaaacaatttataaacatgtggcaggaagtaggaaaagcaatgtatgcccctcccatcagtggacaaattagatgttcatcaaatattactgggctgctattaacaagagatggtggtaataacaacaatgggtccgagatcttcagacctggaggaggcgatatgagggacaattggagaagtgaattatataaatataaagtagtaaaaattgaaccattaggagtagcacccaccaaggcaaagagaagagtggtgcagagagaaaaaagagcagtgggaataggagctttgttccttgggttcttgggagcagcaggaagcactatgggcgcagcgtcaatgacgctgacggtacaggccagacaattattgtctgatatagtgcagcagcagaacaatttgctgagggctattgaggcgcaacagcatctgttgcaactcacagtctggggcatcaaacagctccaggcaagaatcctggctgtggaaagatacctaaaggatcaacagctcctggggatttggggttgctctggaaaactcatttgcaccactgctgtgccttggaatgctagttggagtaataaatctctggaacagatttggaataacatgacctggatggagtgggacagagaaattaacaattacacaagcttaatacactccttaattgaagaatcgcaaaaccagcaagaaaagaatgaacaagaattattggaattagataaatgggcaagtttgtggaattggtttaacataacaaattggctgtggtatataaaattattcataatgatagtaggaggcttggtaggtttaagaatagtttttgctgtactttctatagtgaatagagttaggcagggatattcaccattatcgtttcagacccacctcccaatcccgaggggacccgacaggcccgaaggaatagaagaagaaggtggagagagagacagagacagatccattcgattagtgaacggatccttagcacttatctgggacgatctgcggagcctgtgcgcggccgc

SEQ ID NO: 41 - DNA, 931 bp, Artificial Sequence
  Synthetic Sequence
gcggccgcatccttagcacttatctgggacgatctgcggagcctgtgcctcttcagctaccaccgcttgagagacttactcttgattgtaacgaggattgtggaacttctgggacgcagggggtgggaagccctcaaatattggtggaatctcctacagtattggagtcaggaactaaagaatagtgctgttaacttgctcaatgccacagccatagcagtagctgaggggacagatagggttatagaagtattacaagcagcttatagagctattcgccacatacctagaagaataagacagggcttggaaaggattttgctataagatgggtggcaagtggtcaaaaagtagtgtgattggatggcctgctgtaagggaaagaatgagacgagctgagccagcagcagatggggtgggagcagtatctcgagacctagaaaaacatggagcaatcacaagtagcaatacagcagctaacaatgctgcttgtgcctggctagaagcacaagaggaggaagaggtgggttttccagtcacacctcaggtacctttaagaccaatgacttacaaggcagctgtagatcttagccactttttaaaagaaaaggggggactggaagggctaattcactcccaaagaagacaagatatccttgatctgtggatctaccacacacaaggctacttccctgattggcagaactacacaccagggccaggggtcagatatccactgacctttggatggtgctacaagctagtaccagttgagccagataaggtagaagaggccaataaaggagagaacaccagcttgttacaccctgtgagcctgcatggaatggatgaccctgagagagaagtgttagagtggaggtttgacagccgcctagcatttcatcacgtggcccgagagctgcgcggccgc

SEQ ID NO: 42 - DNA, 820 bp, Artificial Sequence
  Synthetic Sequence
gcggccgcatccttagcacttatctgggacgatctgcggagcctgtgcctcttcagctaccaccgcttgagagacttactcttgattgtaacgaggattgtggaacttctgggacgcagggggtgggaagccctcaaatattggtggaatctcctacagtattggagtcaggaactaaagaatagtgctgttaacttgctcaatgccacagccatagcagtagctgaggggacagatagggttatagaagtattacaagcagcttatagagctattcgccacatacctagaagaataagacagggcttggaaaggattttgctataagatgggtggcaagtggtcaaaaagtagtgtgattggatggcctgctgtaagggaaagaatgagacgagctgagccagcagcagatggggtgggagcagtatctcgagacctagaaaaacatggagcaatcacaagtagcaatacagcagctaacaatgctgcttgtgcctggctagaagcacaagaggaggaagaggtgggttttccagtcacacctcaggtacctttaagaccaatgacttacaaggcagctgtagatcttagccactttttaaaagaaaaggggggactggaagggctaattcactcccaaagaagacaagatatccttaccgtccatgaagggttcgatcgtaaagtgggatagttttttatggcaacggcagattcgttgagcctgcatggaatggatgaccctgagagagaagtgttagagtggaggtttgacagccgcctagcatttcatcacgtggcccgagagctgcgcggccgc

SEQ ID NO: 43 - DNA, 509 bp, Artificial Sequence
  Synthetic Sequence
gcggccgcgacagccgcctagcatttcatcacgtggcccgagagctgcatccggagtacttcaagaactgctgacatcgagcttgctacaagggactttccgctggggactttccagggaggcgtggcctgggcgggactggggagtggcgagccctcagatgctgcatataagcagctgctttttgcctgtactgggtctctctggttagaccagatctgagcctgggagctctctggctaactagggaacccactgcttaagcctcaataaagcttgccttgagtgcttcaagtagtgtgtgcccgtctgttgtgtgactctggtaactagagatccctcagacccttttagtcagtgtggaaaatctctagcacccaggaggtagaggttgcagtgagccaagatcgcgctctagagtcgacctgcaggcatgcaagcttggcgtaatcaggcgcgccagtgtaaagcctggggtgcctaatgagtgagctaactcacgcggccgc

SEQ ID NO: 44 - DNA, 20 bp, Artificial Sequence
  Synthetic Sequence
ttgaacccatggccggatca

SEQ ID NO: 45 - DNA, 20 bp, Artificial Sequence
  Synthetic Sequence
tggacccgcccggacgctca

SEQ ID NO: 46 - DNA, 20 bp, Artificial Sequence
  Synthetic Sequence
caggcagctcaagaaacacg

SEQ ID NO: 47 - DNA, 20 bp, Artificial Sequence
  Synthetic Sequence
tcgacagtgtaatgtctgca

SEQ ID NO: 48 - DNA, 20 bp, Artificial Sequence
  Synthetic Sequence
ggggggcggcgattacttgt

SEQ ID NO: 49 - DNA, 20 bp, Artificial Sequence
  Synthetic Sequence
gagctgcagggcatgttata

SEQ ID NO: 50 - DNA, 20 bp, Artificial Sequence
  Synthetic Sequence
ggcgaccctcggccgtggac

SEQ ID NO: 51 - DNA, 20 bp, Artificial Sequence
  Synthetic Sequence
cagcttgttcagatgctgta

SEQ ID NO: 52 - DNA, 20 bp, Artificial Sequence
  Synthetic Sequence
tcttgaacagcgcggtctgt

SEQ ID NO: 53 - DNA, 20 bp, Artificial Sequence
  Synthetic Sequence
gatcggtcgtcgcagcggtc

SEQ ID NO: 54 - DNA, 20 bp, Artificial Sequence
  Synthetic Sequence
tatctgtagccaacattcga

SEQ ID NO: 55 - DNA, 20 bp, Artificial Sequence
  Synthetic Sequence
cgtaaagtgggatagttttt

SEQ ID NO: 56 - DNA, 9709 bp, Artificial Sequence
  Synthetic Sequence
tggaagggctaatttggtcccaaaaaagacaagagatccttgatctgtggatctaccacacacaaggctacttccctgattggcagaactacacaccagggccagggatcagatatccactgacctttggatggtgcttcaagttagtaccagttgaaccagagcaagtagaagaggccaatgaaggagagaacaacagcttgttacaccctatgagccagcatgggatggaggacccggagggagaagtattagtgtggaagtttgacagcctcctagcatttcgtcacatggcccgagagctgcatccggagtactacaaagactgctgacatcgagctttctacaagggactttccgctggggactttccagggaggtgtggcctgggcgggactggggagtggcgagccctcagatgctacatataagcagctgctttttgcctgtactgggtctctctggttagaccagatctgagcctgggagctctctggctaactagggaacccactgcttaagcctcaataaagcttgccttgagtgctcaaagtagtgtgtgcccgtctgttgtgtgactctggtaactagagatccctcagacccttttagtcagtgtggaaaatctctagcagtggcgcccgaacagggacttgaaagcgaaagtaaagccagaggagatctctcgacgcaggactcggcttgctgaagcgcgcacggcaagaggcgaggggcggcgactggtgagtacgccaaaaattttgactagcggaggctagaaggagagagatgggtgcgagagcgtcggtattaagcgggggagaattagataaatgggaaaaaattcggttaaggccagggggaaagaaacaatataaactaaaacatatagtatgggcaagcagggagctagaacgattcgcagttaatcctggccttttagagacatcagaaggctgtagacaaatactgggacagctacaaccatcccttcagacaggatcagaagaacttagatcattatataatacaatagcagtcctctattgtgtgcatcaaaggatagatgtaaaagacaccaaggaagccttagataagatagaggaagagcaaaacaaaagtaagaaaaaggcacagcaagcagcagctgacacaggaaacaacagccaggtcagccaaaattaccctatagtgcagaacctccaggggcaaatggtacatcaggccatatcacctagaactttaaatgcatgggtaaaagtagtagaagagaaggctttcagcccagaagtaatacccatgttttcagcattatcagaaggagccaccccacaagatttaaataccatgctaaacacagtggggggacatcaagcagccatgcaaatgttaaaagagaccatcaatgaggaagctgcagaatgggatagattgcatccagtgcatgcagggcctattgcaccaggccagatgagagaaccaaggggaagtgacatagcaggaactactagtacccttcaggaacaaataggatggatgacacataatccacctatcccagtaggagaaatctataaaagatggataatcctgggattaaataaaatagtaagaatgtatagccctaccagcattctggacataagacaaggaccaaaggaaccctttagagactatgtagaccgattctataaaactctaagagccgagcaagcttcacaagaggtaaaaaattggatgacagaaaccttgttggtccaaaatgcgaacccagattgtaagactattttaaaagcattgggaccaggagcgacactagaagaaatgatgacagcatgtcagggagtggggggacccggccataaagcaagagttttggctgaagcaatgagccaagtaacaaatccagctaccataatgatacagaaaggcaattttaggaaccaaagaaagactgttaagtgtttcaattgtggcaaagaagggcacatagccaaaaattgcagggcccctaggaaaaagggctgttggaaatgtggaaaggaaggacaccaaatgaaagattgtactgagagacaggctaattttttagggaagatctggccttcccacaagggaaggccagggaattttcttcagagcagaccagagccaacagccccaccagaagagagcttcaggtttggggaagagacaacaactccctctcagaagcaggagccgatagacaaggaactgtatcctttagcttccctcagatcactctttggcagcgacccctcgtcacaataaagataggggggcaattaaaggaagctctattagatacaggagcagatgatacagtattagaagaaatgaatttgccaggaagatggaaaccaaaaatgatagggggaattggaggttttatcaaagtaagacagtatgatcagatactcatagaaatctgcggacataaagctataggtacagtattagtaggacctacacctgtcaacataattggaagaaatctgttgactcagattggctgcactttaaattttcccattagtcctattgagactgtaccagtaaaattaaagccaggaatggatggcccaaaagttaaacaatggccattgacagaagaaaaaataaaagcattagtagaaatttgtacagaaatggaaaaggaaggaaaaatttcaaaaattgggcctgaaaatccatacaatactccagtatttgccataaagaaaaaagacagtactaaatggagaaaattagtagatttcagagaacttaataagagaactcaagatttctgggaagttcaattaggaataccacatcctgcagggttaaaacagaaaaaatcagtaacagtactggatgtgggcgatgcatatttttcagttcccttagataaagacttcaggaagtatactgcatttaccatacctagtataaacaatgagacaccagggattagatatcagtacaatgtgcttccacagggatggaaaggatcaccagcaatattccagtgtagcatgacaaaaatcttagagccttttagaaaacaaaatccagacatagtcatctatcaatacatggatgatttgtatgtaggatctgacttagaaatagggcagcatagaacaaaaatagaggaactgagacaacatctgttgaggtggggatttaccacaccagacaaaaaacatcagaaagaacctccattcctttggatgggttatgaactccatcctgataaatggacagtacagcctatagtgctgccagaaaaggacagctggactgtcaatgacatacagaaattagtgggaaaattgaattgggcaagtcagatttatgcagggattaaagtaaggcaattatgtaaacttcttaggggaaccaaagcactaacagaagtagtaccactaacagaagaagcagagctagaactggcagaaaacagggagattctaaaagaaccggtacatggagtgtattatgacccatcaaaagacttaatagcagaaatacagaagcaggggcaaggccaatggacatatcaaatttatcaagagccatttaaaaatctgaaaacaggaaagtatgcaagaatgaagggtgcccacactaatgatgtgaaacaattaacagaggcagtacaaaaaatagccacagaaagcatagtaatatggggaaagactcctaaatttaaattacccatacaaaaggaaacatgggaagcatggtggacagagtattggcaagccacctggattcctgagtgggagtttgtcaatacccctcccttagtgaagttatggtaccagttagagaaagaacccataataggagcagaaactttctatgtagatggggcagccaatagggaaactaaattaggaaaagcaggatatgtaactgacagaggaagacaaaaagttgtccccctaacggacacaacaaatcagaagactgagttacaagcaattcatctagctttgcaggattcgggattagaagtaaacatagtgacagactcacaatatgcattgggaatcattcaagcacaaccagataagagtgaatcagagttagtcagtcaaataatagagcagttaataaaaaaggaaaaagtctacctggcatgggtaccagcacacaaaggaattggaggaaatgaacaagtagataaattggtcagtgctggaatcaggaaagtactatttttagatggaatagataaggcccaagaagaacatgagaaatatcacagtaattggagagcaatggctagtgattttaacctaccacctgtagtagcaaaagaaatagtagccagctgtgataaatgtcagctaaaaggggaagccatgcatggacaagtagactgtagcccaggaatatggcagctagattgtacacatttagaaggaaaagttatcttggtagcagttcatgtagccagtggatatatagaagcagaagtaattccagcagagacagggcaagaaacagcatacttcctcttaaaattagcaggaagatggccagtaaaaacagtacatacagacaatggcagcaatttcaccagtactacagttaaggccgcctgttggtgggcggggatcaagcaggaatttggcattccctacaatccccaaagtcaaggagtaatagaatctatgaataaagaattaaagaaaattataggacaggtaagagatcaggctgaacatcttaagacagcagtacaaatggcagtattcatccacaattttaaaagaaaaggggggattggggggtacagtgcaggggaaagaatagtagacataatagcaacagacatacaaactaaagaattacaaaaacaaattacaaaaattcaaaattttcgggtttattacagggacagcagagatccagtttggaaaggaccagcaaagctcctctggaaaggtgaaggggcagtagtaatacaagataatagtgacataaaagtagtgccaagaagaaaagcaaagatcatcagggattatggaaaacagatggcaggtgatgattgtgtggcaagtagacaggatgaggattaacacatggaaaagattagtaaaacaccatatgtatatttcaaggaaagctaaggactggttttatagacatcactatgaaagtactaatccaaaaataagttcagaagtacacatcccactaggggatgctaaattagtaataacaacatattggggtctgcatacaggagaaagagactggcatttgggtcagggagtctccatagaatggaggaaaaagagatatagcacacaagtagaccctgacctagcagaccaactaattcatctgcactattttgattgtttttcagaatctgctataagaaataccatattaggacgtatagttagtcctaggtgtgaatatcaagcaggacataacaaggtaggatctctacagtacttggcactagcagcattaataaaaccaaaacagataaagccacctttgcctagtgttaggaaactgacagaggacagatggaacaagccccagaagaccaagggccacagagggagccatacaatgaatggacactagagcttttagaggaacttaagagtgaagctgttagacattttcctaggatatggctccataacttaggacaacatatctatgaaacttacggggatacttgggcaggagtggaagccataataagaattctgcaacaactgctgtttatccatttcagaattgggtgtcgacatagcagaataggcgttactcgacagaggagagcaagaaatggagccagtagatcctagactagagccctggaagcatccaggaagtcagcctaaaactgcttgtaccaattgctattgtaaaaagtgttgctttcattgccaagtttgtttcatgacaaaagccttaggcatctcctatggcaggaagaagcggagacagcgacgaagagctcatcagaacagtcagactcatcaagcttctctatcaaagcagtaagtagtacatgtaatgcaacctataatagtagcaatagtagcattagtagtagcaataataatagcaatagttgtgtggtccatagtaatcatagaatataggaaaatattaagacaaagaaaaatagacaggttaattgatagactaatagaaagagcagaagacagtggcaatgagagtgaaggagaagtatcagcacttgtggagatgggggtggaaatggggcaccatgctccttgggatattgatgatctgtagtgctacagaaaaattgtgggtcacagtctattatggggtacctgtgtggaaggaagcaaccaccactctattttgtgcatcagatgctaaagcatatgatacagaggtacataatgtttgggccacacatgcctgtgtacccacagaccccaacccacaagaagtagtattggtaaatgtgacagaaaattttaacatgtggaaaaatgacatggtagaacagatgcatgaggatataatcagtttatgggatcaaagcctaaagccatgtgtaaaattaaccccactctgtgttagtttaaagtgcactgatttgaagaatgatactaataccaatagtagtagcgggagaatgataatggagaaaggagagataaaaaactgctctttcaatatcagcacaagcataagagataaggtgcagaaagaatatgcattcttttataaacttgatatagtaccaatagataataccagctataggttgataagttgtaacacctcagtcattacacaggcctgtccaaaggtatcctttgagccaattcccatacattattgtgccccggctggttttgcgattctaaaatgtaataataagacgttcaatggaacaggaccatgtacaaatgtcagcacagtacaatgtacacatggaatcaggccagtagtatcaactcaactgctgttaaatggcagtctagcagaagaagatgtagtaattagatctgccaatttcacagacaatgctaaaaccataatagtacagctgaacacatctgtagaaattaattgtacaagacccaacaacaatacaagaaaaagtatccgtatccagaggggaccagggagagcatttgttacaataggaaaaataggaaatatgagacaagcacattgtaacattagtagagcaaaatggaatgccactttaaaacagatagctagcaaattaagagaacaatttggaaataataaaacaataatctttaagcaatcctcaggaggggacccagaaattgtaacgcacagttttaattgtggaggggaatttttctactgtaattcaacacaactgtttaatagtacttggtttaatagtacttggagtactgaagggtcaaataacactgaaggaagtgacacaatcacactcccatgcagaataaaacaatttataaacatgtggcaggaagtaggaaaagcaatgtatgcccctcccatcagtggacaaattagatgttcatcaaatattactgggctgctattaacaagagatggtggtaataacaacaatgggtccgagatcttcagacctggaggaggcgatatgagggacaattggagaagtgaattatataaatataaagtagtaaaaattgaaccattaggagtagcacccaccaaggcaaagagaagagtggtgcagagagaaaaaagagcagtgggaataggagctttgttccttgggttcttgggagcagcaggaagcactatgggcgcagcgtcaatgacgctgacggtacaggccagacaattattgtctgatatagtgcagcagcagaacaatttgctgagggctattgaggcgcaacagcatctgttgcaactcacagtctggggcatcaaacagctccaggcaagaatcctggctgtggaaagatacctaaaggatcaacagctcctggggatttggggttgctctggaaaactcatttgcaccactgctgtgccttggaatgctagttggagtaataaatctctggaacagatttggaataacatgacctggatggagtgggacagagaaattaacaattacacaagcttaatacactccttaattgaagaatcgcaaaaccagcaagaaaagaatgaacaagaattattggaattagataaatgggcaagtttgtggaattggtttaacataacaaattggctgtggtatataaaattattcataatgatagtaggaggcttggtaggtttaagaatagtttttgctgtactttctatagtgaatagagttaggcagggatattcaccattatcgtttcagacccacctcccaatcccgaggggacccgacaggcccgaaggaatagaagaagaaggtggagagagagacagagacagatccattcgattagtgaacggatccttagcacttatctgggacgatctgcggagcctgtgcctcttcagctaccaccgcttgagagacttactcttgattgtaacgaggattgtggaacttctgggacgcagggggtgggaagccctcaaatattggtggaatctcctacagtattggagtcaggaactaaagaatagtgctgttaacttgctcaatgccacagccatagcagtagctgaggggacagatagggttatagaagtattacaagcagcttatagagctattcgccacatacctagaagaataagacagggcttggaaaggattttgctataagatgggtggcaagtggtcaaaaagtagtgtgattggatggcctgctgtaagggaaagaatgagacgagctgagccagcagcagatggggtgggagcagtatctcgagacctagaaaaacatggagcaatcacaagtagcaatacagcagctaacaatgctgcttgtgcctggctagaagcacaagaggaggaagaggtgggttttccagtcacacctcaggtacctttaagaccaatgacttacaaggcagctgtagatcttagccactttttaaaagaaaaggggggactggaagggctaattcactcccaaagaagacaagatatccttgatctgtggatctaccacacacaaggctacttccctgattggcagaactacacaccagggccaggggtcagatatccactgacctttggatggtgctacaagctagtaccagttgagccagataaggtagaagaggccaataaaggagagaacaccagcttgttacaccctgtgagcctgcatggaatggatgaccctgagagagaagtgttagagtggaggtttgacagccgcctagcatttcatcacgtggcccgagagctgcatccggagtacttcaagaactgctgacatcgagcttgctacaagggactttccgctggggactttccagggaggcgtggcctgggcgggactggggagtggcgagccctcagatgctgcatataagcagctgctttttgcctgtactgggtctctctggttagaccagatctgagcctgggagctctctggctaactagggaacccactgcttaagcctcaataaagcttgccttgagtgcttcaagtagtgtgtgcccgtctgttgtgtgactctggtaactagagatccctcagacccttttagtcagtgtggaaaatctctagca

SEQ ID NO: 57 - DNA, 9598 bp, Artificial Sequence
  Synthetic Sequence
tggaagggctaatttggtcccaaaaaagacaagagatccttgatctgtggatctaccacacacaaggctacttccctgattggcagaactacacaccagggccagggatcagatatccactgacctttggatggtgcttcaagttagtaccagttgaaccagagcaagtagaagaggccaatgaaggagagaacaacagcttgttacaccctatgagccagcatgggatggaggacccggagggagaagtattagtgtggaagtttgacagcctcctagcatttcgtcacatggcccgagagctgcatccggagtactacaaagactgctgacatcgagctttctacaagggactttccgctggggactttccagggaggtgtggcctgggcgggactggggagtggcgagccctcagatgctacatataagcagctgctttttgcctgtactgggtctctctggttagaccagatctgagcctgggagctctctggctaactagggaacccactgcttaagcctcaataaagcttgccttgagtgctcaaagtagtgtgtgcccgtctgttgtgtgactctggtaactagagatccctcagacccttttagtcagtgtggaaaatctctagcagtggcgcccgaacagggacttgaaagcgaaagtaaagccagaggagatctctcgacgcaggactcggcttgctgaagcgcgcacggcaagaggcgaggggcggcgactggtgagtacgccaaaaattttgactagcggaggctagaaggagagagatgggtgcgagagcgtcggtattaagcgggggagaattagataaatgggaaaaaattcggttaaggccagggggaaagaaacaatataaactaaaacatatagtatgggcaagcagggagctagaacgattcgcagttaatcctggccttttagagacatcagaaggctgtagacaaatactgggacagctacaaccatcccttcagacaggatcagaagaacttagatcattatataatacaatagcagtcctctattgtgtgcatcaaaggatagatgtaaaagacaccaaggaagccttagataagatagaggaagagcaaaacaaaagtaagaaaaaggcacagcaagcagcagctgacacaggaaacaacagccaggtcagccaaaattaccctatagtgcagaacctccaggggcaaatggtacatcaggccatatcacctagaactttaaatgcatgggtaaaagtagtagaagagaaggctttcagcccagaagtaatacccatgttttcagcattatcagaaggagccaccccacaagatttaaataccatgctaaacacagtggggggacatcaagcagccatgcaaatgttaaaagagaccatcaatgaggaagctgcagaatgggatagattgcatccagtgcatgcagggcctattgcaccaggccagatgagagaaccaaggggaagtgacatagcaggaactactagtacccttcaggaacaaataggatggatgacacataatccacctatcccagtaggagaaatctataaaagatggataatcctgggattaaataaaatagtaagaatgtatagccctaccagcattctggacataagacaaggaccaaaggaaccctttagagactatgtagaccgattctataaaactctaagagccgagcaagcttcacaagaggtaaaaaattggatgacagaaaccttgttggtccaaaatgcgaacccagattgtaagactattttaaaagcattgggaccaggagcgacactagaagaaatgatgacagcatgtcagggagtggggggacccggccataaagcaagagttttggctgaagcaatgagccaagtaacaaatccagctaccataatgatacagaaaggcaattttaggaaccaaagaaagactgttaagtgtttcaattgtggcaaagaagggcacatagccaaaaattgcagggcccctaggaaaaagggctgttggaaatgtggaaaggaaggacaccaaatgaaagattgtactgagagacaggctaattttttagggaagatctggccttcccacaagggaaggccagggaattttcttcagagcagaccagagccaacagccccaccagaagagagcttcaggtttggggaagagacaacaactccctctcagaagcaggagccgatagacaaggaactgtatcctttagcttccctcagatcactctttggcagcgacccctcgtcacaataaagataggggggcaattaaaggaagctctattagatacaggagcagatgatacagtattagaagaaatgaatttgccaggaagatggaaaccaaaaatgatagggggaattggaggttttatcaaagtaagacagtatgatcagatactcatagaaatctgcggacataaagctataggtacagtattagtaggacctacacctgtcaacataattggaagaaatctgttgactcagattggctgcactttaaattttcccattagtcctattgagactgtaccagtaaaattaaagccaggaatggatggcccaaaagttaaacaatggccattgacagaagaaaaaataaaagcattagtagaaatttgtacagaaatggaaaaggaaggaaaaatttcaaaaattgggcctgaaaatccatacaatactccagtatttgccataaagaaaaaagacagtactaaatggagaaaattagtagatttcagagaacttaataagagaactcaagatttctgggaagttcaattaggaataccacatcctgcagggttaaaacagaaaaaatcagtaacagtactggatgtgggcgatgcatatttttcagttcccttagataaagacttcaggaagtatactgcatttaccatacctagtataaacaatgagacaccagggattagatatcagtacaatgtgcttccacagggatggaaaggatcaccagcaatattccagtgtagcatgacaaaaatcttagagccttttagaaaacaaaatccagacatagtcatctatcaatacatggatgatttgtatgtaggatctgacttagaaatagggcagcatagaacaaaaatagaggaactgagacaacatctgttgaggtggggatttaccacaccagacaaaaaacatcagaaagaacctccattcctttggatgggttatgaactccatcctgataaatggacagtacagcctatagtgctgccagaaaaggacagctggactgtcaatgacatacagaaattagtgggaaaattgaattgggcaagtcagatttatgcagggattaaagtaaggcaattatgtaaacttcttaggggaaccaaagcactaacagaagtagtaccactaacagaagaagcagagctagaactggcagaaaacagggagattctaaaagaaccggtacatggagtgtattatgacccatcaaaagacttaatagcagaaatacagaagcaggggcaaggccaatggacatatcaaatttatcaagagccatttaaaaatctgaaaacaggaaagtatgcaagaatgaagggtgcccacactaatgatgtgaaacaattaacagaggcagtacaaaaaatagccacagaaagcatagtaatatggggaaagactcctaaatttaaattacccatacaaaaggaaacatgggaagcatggtggacagagtattggcaagccacctggattcctgagtgggagtttgtcaatacccctcccttagtgaagttatggtaccagttagagaaagaacccataataggagcagaaactttctatgtagatggggcagccaatagggaaactaaattaggaaaagcaggatatgtaactgacagaggaagacaaaaagttgtccccctaacggacacaacaaatcagaagactgagttacaagcaattcatctagctttgcaggattcgggattagaagtaaacatagtgacagactcacaatatgcattgggaatcattcaagcacaaccagataagagtgaatcagagttagtcagtcaaataatagagcagttaataaaaaaggaaaaagtctacctggcatgggtaccagcacacaaaggaattggaggaaatgaacaagtagataaattggtcagtgctggaatcaggaaagtactatttttagatggaatagataaggcccaagaagaacatgagaaatatcacagtaattggagagcaatggctagtgattttaacctaccacctgtagtagcaaaagaaatagtagccagctgtgataaatgtcagctaaaaggggaagccatgcatggacaagtagactgtagcccaggaatatggcagctagattgtacacatttagaaggaaaagttatcttggtagcagttcatgtagccagtggatatatagaagcagaagtaattccagcagagacagggcaagaaacagcatacttcctcttaaaattagcaggaagatggccagtaaaaacagtacatacagacaatggcagcaatttcaccagtactacagttaaggccgcctgttggtgggcggggatcaagcaggaatttggcattccctacaatccccaaagtcaaggagtaatagaatctatgaataaagaattaaagaaaattataggacaggtaagagatcaggctgaacatcttaagacagcagtacaaatggcagtattcatccacaattttaaaagaaaaggggggattggggggtacagtgcaggggaaagaatagtagacataatagcaacagacatacaaactaaagaattacaaaaacaaattacaaaaattcaaaattttcgggtttattacagggacagcagagatccagtttggaaaggaccagcaaagctcctctggaaaggtgaaggggcagtagtaatacaagataatagtgacataaaagtagtgccaagaagaaaagcaaagatcatcagggattatggaaaacagatggcaggtgatgattgtgtggcaagtagacaggatgaggattaacacatggaaaagattagtaaaacaccatatgtatatttcaaggaaagctaaggactggttttatagacatcactatgaaagtactaatccaaaaataagttcagaagtacacatcccactaggggatgctaaattagtaataacaacatattggggtctgcatacaggagaaagagactggcatttgggtcagggagtctccatagaatggaggaaaaagagatatagcacacaagtagaccctgacctagcagaccaactaattcatctgcactattttgattgtttttcagaatctgctataagaaataccatattaggacgtatagttagtcctaggtgtgaatatcaagcaggacataacaaggtaggatctctacagtacttggcactagcagcattaataaaaccaaaacagataaagccacctttgcctagtgttaggaaactgacagaggacagatggaacaagccccagaagaccaagggccacagagggagccatacaatgaatggacactagagcttttagaggaacttaagagtgaagctgttagacattttcctaggatatggctccataacttaggacaacatatctatgaaacttacggggatacttgggcaggagtggaagccataataagaattctgcaacaactgctgtttatccatttcagaattgggtgtcgacatagcagaataggcgttactcgacagaggagagcaagaaatggagccagtagatcctagactagagccctggaagcatccaggaagtcagcctaaaactgcttgtaccaattgctattgtaaaaagtgttgctttcattgccaagtttgtttcatgacaaaagccttaggcatctcctatggcaggaagaagcggagacagcgacgaagagctcatcagaacagtcagactcatcaagcttctctatcaaagcagtaagtagtacatgtaatgcaacctataatagtagcaatagtagcattagtagtagcaataataatagcaatagttgtgtggtccatagtaatcatagaatataggaaaatattaagacaaagaaaaatagacaggttaattgatagactaatagaaagagcagaagacagtggcaatgagagtgaaggagaagtatcagcacttgtggagatgggggtggaaatggggcaccatgctccttgggatattgatgatctgtagtgctacagaaaaattgtgggtcacagtctattatggggtacctgtgtggaaggaagcaaccaccactctattttgtgcatcagatgctaaagcatatgatacagaggtacataatgtttgggccacacatgcctgtgtacccacagaccccaacccacaagaagtagtattggtaaatgtgacagaaaattttaacatgtggaaaaatgacatggtagaacagatgcatgaggatataatcagtttatgggatcaaagcctaaagccatgtgtaaaattaaccccactctgtgttagtttaaagtgcactgatttgaagaatgatactaataccaatagtagtagcgggagaatgataatggagaaaggagagataaaaaactgctctttcaatatcagcacaagcataagagataaggtgcagaaagaatatgcattcttttataaacttgatatagtaccaatagataataccagctataggttgataagttgtaacacctcagtcattacacaggcctgtccaaaggtatcctttgagccaattcccatacattattgtgccccggctggttttgcgattctaaaatgtaataataagacgttcaatggaacaggaccatgtacaaatgtcagcacagtacaatgtacacatggaatcaggccagtagtatcaactcaactgctgttaaatggcagtctagcagaagaagatgtagtaattagatctgccaatttcacagacaatgctaaaaccataatagtacagctgaacacatctgtagaaattaattgtacaagacccaacaacaatacaagaaaaagtatccgtatccagaggggaccagggagagcatttgttacaataggaaaaataggaaatatgagacaagcacattgtaacattagtagagcaaaatggaatgccactttaaaacagatagctagcaaattaagagaacaatttggaaataataaaacaataatctttaagcaatcctcaggaggggacccagaaattgtaacgcacagttttaattgtggaggggaatttttctactgtaattcaacacaactgtttaatagtacttggtttaatagtacttggagtactgaagggtcaaataacactgaaggaagtgacacaatcacactcccatgcagaataaaacaatttataaacatgtggcaggaagtaggaaaagcaatgtatgcccctcccatcagtggacaaattagatgttcatcaaatattactgggctgctattaacaagagatggtggtaataacaacaatgggtccgagatcttcagacctggaggaggcgatatgagggacaattggagaagtgaattatataaatataaagtagtaaaaattgaaccattaggagtagcacccaccaaggcaaagagaagagtggtgcagagagaaaaaagagcagtgggaataggagctttgttccttgggttcttgggagcagcaggaagcactatgggcgcagcgtcaatgacgctgacggtacaggccagacaattattgtctgatatagtgcagcagcagaacaatttgctgagggctattgaggcgcaacagcatctgttgcaactcacagtctggggcatcaaacagctccaggcaagaatcctggctgtggaaagatacctaaaggatcaacagctcctggggatttggggttgctctggaaaactcatttgcaccactgctgtgccttggaatgctagttggagtaataaatctctggaacagatttggaataacatgacctggatggagtgggacagagaaattaacaattacacaagcttaatacactccttaattgaagaatcgcaaaaccagcaagaaaagaatgaacaagaattattggaattagataaatgggcaagtttgtggaattggtttaacataacaaattggctgtggtatataaaattattcataatgatagtaggaggcttggtaggtttaagaatagtttttgctgtactttctatagtgaatagagttaggcagggatattcaccattatcgtttcagacccacctcccaatcccgaggggacccgacaggcccgaaggaatagaagaagaaggtggagagagagacagagacagatccattcgattagtgaacggatccttagcacttatctgggacgatctgcggagcctgtgcctcttcagctaccaccgcttgagagacttactcttgattgtaacgaggattgtggaacttctgggacgcagggggtgggaagccctcaaatattggtggaatctcctacagtattggagtcaggaactaaagaatagtgctgttaacttgctcaatgccacagccatagcagtagctgaggggacagatagggttatagaagtattacaagcagcttatagagctattcgccacatacctagaagaataagacagggcttggaaaggattttgctataagatgggtggcaagtggtcaaaaagtagtgtgattggatggcctgctgtaagggaaagaatgagacgagctgagccagcagcagatggggtgggagcagtatctcgagacctagaaaaacatggagcaatcacaagtagcaatacagcagctaacaatgctgcttgtgcctggctagaagcacaagaggaggaagaggtgggttttccagtcacacctcaggtacctttaagaccaatgacttacaaggcagctgtagatcttagccactttttaaaagaaaaggggggactggaagggctaattcactcccaaagaagacaagatatccttaccgtccatgaagggttcgatcgtaaagtgggatagttttttatggcaacggcagattcgttgagcctgcatggaatggatgaccctgagagagaagtgttagagtggaggtttgacagccgcctagcatttcatcacgtggcccgagagctgcatccggagtacttcaagaactgctgacatcgagcttgctacaagggactttccgctggggactttccagggaggcgtggcctgggcgggactggggagtggcgagccctcagatgctgcatataagcagctgctttttgcctgtactgggtctctctggttagaccagatctgagcctgggagctctctggctaactagggaacccactgcttaagcctcaataaagcttgccttgagtgcttcaagtagtgtgtgcccgtctgttgtgtgactctggtaactagagatccctcagacccttttagtcagtgtggaaaatctctagca

SEQ ID NO: 58 - DNA, 8786 bp, Artificial Sequence
  Synthetic Sequence
tggaagggctaatttggtcccaaaaaagacaagagatccttgatctgtggatctaccacacacaaggctacttccctgattggcagaactacacaccagggccagggatcagatatccactgacctttggatggtgcttcaagttagtaccagttgaaccagagcaagtagaagaggccaatgaaggagagaacaacagcttgttacaccctatgagccagcatgggatggaggacccggagggagaagtattagtgtggaagtttgacagcctcctagcatttcgtcacatggcccgagagctgcatccggagtactacaaagactgctgacatcgagctttctacaagggactttccgctggggactttccagggaggtgtggcctgggcgggactggggagtggcgagccctcagatgctacatataagcagctgctttttgcctgtactgggtctctctggttagaccagatctgagcctgggagctctctggctaactagggaacccactgcttaagcctcaataaagcttgccttgagtgctcaaagtagtgtgtgcccgtctgttgtgtgactctggtaactagagatccctcagacccttttagtcagtgtggaaaatctctagcagtggcgcccgaacagggacttgaaagcgaaagtaaagccagaggagatctctcgacgcaggactcggcttgctgaagcgcgcacggcaagaggcgaggggcggcgactggtgagtacgccaaaaattttgactagcggaggctagaaggagagagatgggtgcgagagcgtcggtattaagcgggggagaattagataaatgggaaaaaattcggttaaggccagggggaaagaaacaatataaactaaaacatatagtatgggcaagcagggagctagaacgattcgcagttaatcctggccttttagagacatcagaaggctgtagacaaatactgggacagctacaaccatcccttcagacaggatcagaagaacttagatcattatataatacaatagcagtcctctattgtgtgcatcaaaggatagatgtaaaagacaccaaggaagccttagataagatagaggaagagcaaaacaaaagtaagaaaaaggcacagcaagcagcagctgacacaggaaacaacagccaggtcagccaaaattaccctatagtgcagaacctccaggggcaaatggtacatcaggccatatcacctagaactttaaatgcatgggtaaaagtagtagaagagaaggctttcagcccagaagtaatacccatgttttcagcattatcagaaggagccaccccacaagatttaaataccatgctaaacacagtggggggacatcaagcagccatgcaaatgttaaaagagaccatcaatgaggaagctgcagaatgggatagattgcatccagtgcatgcagggcctattgcaccaggccagatgagagaaccaaggggaagtgacatagcaggaactactagtacccttcaggaacaaataggatggatgacacataatccacctatcccagtaggagaaatctataaaagatggataatcctgggattaaataaaatagtaagaatgtatagccctaccagcattctggacataagacaaggaccaaaggaaccctttagagactatgtagaccgattctataaaactctaagagccgagcaagcttcacaagaggtaaaaaattggatgacagaaaccttgttggtccaaaatgcgaacccagattgtaagactattttaaaagcattgggaccaggagcgacactagaagaaatgatgacagcatgtcagggagtggggggacccggccataaagcaagagttttggctgaagcaatgagccaagtaacaaatccagctaccataatgatacagaaaggcaattttaggaaccaaagaaagactgttaagtgtttcaattgtggcaaagaagggcacatagccaaaaattgcagggcccctaggaaaaagggctgttggaaatgtggaaaggaaggacaccaaatgaaagattgtactgagagacaggctaattttttagggaagatctggccttcccacaagggaaggccagggaattttcttcagagcagaccagagccaacagccccaccagaagagagcttcaggtttggggaagagacaacaactccctctcagaagcaggagccgatagacaaggaactgtatcctttagcttccctcagatcactctttggcagcgacccctcgtcacaataaagataggggggcaattaaaggaagctctattagatacaggagcagatgatacagtattagaagaaatgaatttgccaggaagatggaaaccaaaaatgatagggggaattggaggttttatcaaagtaagacagtatgatcagatactcatagaaatctgcggacataaagctataggtacagtattagtaggacctacacctgtcaacataattggaagaaatctgttgactcagattggctgcactttaaattttcccattagtcctattgagactgtaccagtaaaattaaagccaggaatggatggcccaaaagttaaacaatggccattgacagaagaaaaaataaaagcattagtagaaatttgtacagaaatggaaaaggaaggaaaaatttcaaaaattgggcctgaaaatccatacaatactccagtatttgccataaagaaaaaagacagtactaaatggagaaaattagtagatttcagagaacttaataagagaactcaagatttctgggaagttcaattaggaataccacatcctgcagggttaaaacagaaaaaatcagtaacagtactggatgtgggcgatgcatatttttcagttcccttagataaagacttcaggaagtatactgcatttaccatacctagtataaacaatgagacaccagggattagatatcagtacaatgtgcttccacagggatggaaaggatcaccagcaatattccagtgtagcatgacaaaaatcttagagccttttagaaaacaaaatccagacatagtcatctatcaatacatggatgatttgtatgtaggatctgacttagaaatagggcagcatagaacaaaaatagaggaactgagacaacatctgttgaggtggggatttaccacaccagacaaaaaacatcagaaagaacctccattcctttggatgggttatgaactccatcctgataaatggacagtacagcctatagtgctgccagaaaaggacagctggactgtcaatgacatacagaaattagtgggaaaattgaattgggcaagtcagatttatgcagggattaaagtaaggcaattatgtaaacttcttaggggaaccaaagcactaacagaagtagtaccactaacagaagaagcagagctagaactggcagaaaacagggagattctaaaagaaccggtacatggagtgtattatgacccatcaaaagacttaatagcagaaatacagaagcaggggcaaggccaatggacatatcaaatttatcaagagccatttaaaaatctgaaaacaggaaagtatgcaagaatgaagggtgcccacactaatgatgtgaaacaattaacagaggcagtacaaaaaatagccacagaaagcatagtaatatggggaaagactcctaaatttaaattacccatacaaaaggaaacatgggaagcatggtggacagagtattggcaagccacctggattcctgagtgggagtttgtcaatacccctcccttagtgaagttatggtaccagttagagaaagaacccataataggagcagaaactttctatgtagatggggcagccaatagggaaactaaattaggaaaagcaggatatgtaactgacagaggaagacaaaaagttgtccccctaacggacacaacaaatcagaagactgagttacaagcaattcatctagctttgcaggattcgggattagaagtaaacatagtgacagactcacaatatgcattgggaatcattcaagcacaaccagataagagtgaatcagagttagtcagtcaaataatagagcagttaataaaaaaggaaaaagtctacctggcatgggtaccagcacacaaaggaattggaggaaatgaacaagtagataaattggtcagtgctggaatcaggaaagtactatttttagatggaatagataaggcccaagaagaacatgagaaatatcacagtaattggagagcaatggctagtgattttaacctaccacctgtagtagcaaaagaaatagtagccagctgtgataaatgtcagctaaaaggggaagccatgcatggacaagtagactgtagcccaggaatatggcagctagattgtacacatttagaaggaaaagttatcttggtagcagttcatgtagccagtggatatatagaagcagaagtaattccagcagagacagggcaagaaacagcatacttcctcttaaaattagcaggaagatggccagtaaaaacagtacatacagacaatggcagcaatttcaccagtactacagttaaggccgcctgttggtgggcggggatcaagcaggaatttggcattccctacaatccccaaagtcaaggagtaatagaatctatgaataaagaattaaagaaaattataggacaggtaagagatcaggctgaacatcttaagacagcagtacaaatggcagtattcatccacaattttaaaagaaaaggggggattggggggtacagtgcaggggaaagaatagtagacataatagcaacagacatacaaactaaagaattacaaaaacaaattacaaaaattcaaaattttcgggtttattacagggacagcagagatccagtttggaaaggaccagcaaagctcctctggaaaggtgaaggggcagtagtaatacaagataatagtgacataaaagtagtgccaagaagaaaagcaaagatcatcagggattatggaaaacagatggcaggtgatgattgtgtggcccgtccatgaagggttcgattcttgaacagcgcggtctgttatggcaacggcagattcgtttaatgcaacctataatagtagcaatagtagcattagtagtagcaataataatagcaatagttgtgtggtccatagtaatcatagaatataggaaaatattaagacaaagaaaaatagacaggttaattgatagactaatagaaagagcagaagacagtggcaatgagagtgaaggagaagtatcagcacttgtggagatgggggtggaaatggggcaccatgctccttgggatattgatgatctgtagtgctacagaaaaattgtgggtcacagtctattatggggtacctgtgtggaaggaagcaaccaccactctattttgtgcatcagatgctaaagcatatgatacagaggtacataatgtttgggccacacatgcctgtgtacccacagaccccaacccacaagaagtagtattggtaaatgtgacagaaaattttaacatgtggaaaaatgacatggtagaacagatgcatgaggatataatcagtttatgggatcaaagcctaaagccatgtgtaaaattaaccccactctgtgttagtttaaagtgcactgatttgaagaatgatactaataccaatagtagtagcgggagaatgataatggagaaaggagagataaaaaactgctctttcaatatcagcacaagcataagagataaggtgcagaaagaatatgcattcttttataaacttgatatagtaccaatagataataccagctataggttgataagttgtaacacctcagtcattacacaggcctgtccaaaggtatcctttgagccaattcccatacattattgtgccccggctggttttgcgattctaaaatgtaataataagacgttcaatggaacaggaccatgtacaaatgtcagcacagtacaatgtacacatggaatcaggccagtagtatcaactcaactgctgttaaatggcagtctagcagaagaagatgtagtaattagatctgccaatttcacagacaatgctaaaaccataatagtacagctgaacacatctgtagaaattaattgtacaagacccaacaacaatacaagaaaaagtatccgtatccagaggggaccagggagagcatttgttacaataggaaaaataggaaatatgagacaagcacattgtaacattagtagagcaaaatggaatgccactttaaaacagatagctagcaaattaagagaacaatttggaaataataaaacaataatctttaagcaatcctcaggaggggacccagaaattgtaacgcacagttttaattgtggaggggaatttttctactgtaattcaacacaactgtttaatagtacttggtttaatagtacttggagtactgaagggtcaaataacactgaaggaagtgacacaatcacactcccatgcagaataaaacaatttataaacatgtggcaggaagtaggaaaagcaatgtatgcccctcccatcagtggacaaattagatgttcatcaaatattactgggctgctattaacaagagatggtggtaataacaacaatgggtccgagatcttcagacctggaggaggcgatatgagggacaattggagaagtgaattatataaatataaagtagtaaaaattgaaccattaggagtagcacccaccaaggcaaagagaagagtggtgcagagagaaaaaagagcagtgggaataggagctttgttccttgggttcttgggagcagcaggaagcactatgggcgcagcgtcaatgacgctgacggtacaggccagacaattattgtctgatatagtgcagcagcagaacaatttgctgagggctattgaggcgcaacagcatctgttgcaactcacagtctggggcatcaaacagctccaggcaagaatcctggctgtggaaagatacctaaaggatcaacagctcctggggatttggggttgctctggaaaactcatttgcaccactgctgtgccttggaatgctagttggagtaataaatctctggaacagatttggaataacatgacctggatggagtgggacagagaaattaacaattacacaagcttaatacactccttaattgaagaatcgcaaaaccagcaagaaaagaatgaacaagaattattggaattagataaatgggcaagtttgtggaattggtttaacataacaaattggctgtggtatataaaattattcataatgatagtaggaggcttggtaggtttaagaatagtttttgctgtactttctatagtgaatagagttaggcagggatattcaccattatcgtttcagacccacctcccaatcccgaggggacccgacaggcccgaaggaatagaagaagaaggtggagagagagacagagacagatccattcgattagtgaacggatccttagcacttatctgggacgatctgcggagcctgtgcctcttcagctaccaccgcttgagagacttactcttgattgtaacgaggattgtggaacttctgggacgcagggggtgggaagccctcaaatattggtggaatctcctacagtattggagtcaggaactaaagaatagtgctgttaacttgctcaatgccacagccatagcagtagctgaggggacagatagggttatagaagtattacaagcagcttatagagctattcgccacatacctagaagaataagacagggcttggaaaggattttgctataagatgggtggcaagtggtcaaaaagtagtgtgattggatggcctgctgtaagggaaagaatgagacgagctgagccagcagcagatggggtgggagcagtatctcgagacctagaaaaacatggagcaatcacaagtagcaatacagcagctaacaatgctgcttgtgcctggctagaagcacaagaggaggaagaggtgggttttccagtcacacctcaggtacctttaagaccaatgacttacaaggcagctgtagatcttagccactttttaaaagaaaaggggggactggaagggctaattcactcccaaagaagacaagatatccttgatctgtggatctaccacacacaaggctacttccctgattggcagaactacacaccagggccaggggtcagatatccactgacctttggatggtgctacaagctagtaccagttgagccagataaggtagaagaggccaataaaggagagaacaccagcttgttacaccctgtgagcctgcatggaatggatgaccctgagagagaagtgttagagtggaggtttgacagccgcctagcatttcatcacgtggcccgagagctgcatccggagtacttcaagaactgctgacatcgagcttgctacaagggactttccgctggggactttccagggaggcgtggcctgggcgggactggggagtggcgagccctcagatgctgcatataagcagctgctttttgcctgtactgggtctctctggttagaccagatctgagcctgggagctctctggctaactagggaacccactgcttaagcctcaataaagcttgccttgagtgcttcaagtagtgtgtgcccgtctgttgtgtgactctggtaactagagatccctcagacccttttagtcagtgtggaaaatctctagca

SEQ ID NO: 59 - DNA, 8675 bp, Artificial Sequence
  Synthetic Sequence
tggaagggctaatttggtcccaaaaaagacaagagatccttgatctgtggatctaccacacacaaggctacttccctgattggcagaactacacaccagggccagggatcagatatccactgacctttggatggtgcttcaagttagtaccagttgaaccagagcaagtagaagaggccaatgaaggagagaacaacagcttgttacaccctatgagccagcatgggatggaggacccggagggagaagtattagtgtggaagtttgacagcctcctagcatttcgtcacatggcccgagagctgcatccggagtactacaaagactgctgacatcgagctttctacaagggactttccgctggggactttccagggaggtgtggcctgggcgggactggggagtggcgagccctcagatgctacatataagcagctgctttttgcctgtactgggtctctctggttagaccagatctgagcctgggagctctctggctaactagggaacccactgcttaagcctcaataaagcttgccttgagtgctcaaagtagtgtgtgcccgtctgttgtgtgactctggtaactagagatccctcagacccttttagtcagtgtggaaaatctctagcagtggcgcccgaacagggacttgaaagcgaaagtaaagccagaggagatctctcgacgcaggactcggcttgctgaagcgcgcacggcaagaggcgaggggcggcgactggtgagtacgccaaaaattttgactagcggaggctagaaggagagagatgggtgcgagagcgtcggtattaagcgggggagaattagataaatgggaaaaaattcggttaaggccagggggaaagaaacaatataaactaaaacatatagtatgggcaagcagggagctagaacgattcgcagttaatcctggccttttagagacatcagaaggctgtagacaaatactgggacagctacaaccatcccttcagacaggatcagaagaacttagatcattatataatacaatagcagtcctctattgtgtgcatcaaaggatagatgtaaaagacaccaaggaagccttagataagatagaggaagagcaaaacaaaagtaagaaaaaggcacagcaagcagcagctgacacaggaaacaacagccaggtcagccaaaattaccctatagtgcagaacctccaggggcaaatggtacatcaggccatatcacctagaactttaaatgcatgggtaaaagtagtagaagagaaggctttcagcccagaagtaatacccatgttttcagcattatcagaaggagccaccccacaagatttaaataccatgctaaacacagtggggggacatcaagcagccatgcaaatgttaaaagagaccatcaatgaggaagctgcagaatgggatagattgcatccagtgcatgcagggcctattgcaccaggccagatgagagaaccaaggggaagtgacatagcaggaactactagtacccttcaggaacaaataggatggatgacacataatccacctatcccagtaggagaaatctataaaagatggataatcctgggattaaataaaatagtaagaatgtatagccctaccagcattctggacataagacaaggaccaaaggaaccctttagagactatgtagaccgattctataaaactctaagagccgagcaagcttcacaagaggtaaaaaattggatgacagaaaccttgttggtccaaaatgcgaacccagattgtaagactattttaaaagcattgggaccaggagcgacactagaagaaatgatgacagcatgtcagggagtggggggacccggccataaagcaagagttttggctgaagcaatgagccaagtaacaaatccagctaccataatgatacagaaaggcaattttaggaaccaaagaaagactgttaagtgtttcaattgtggcaaagaagggcacatagccaaaaattgcagggcccctaggaaaaagggctgttggaaatgtggaaaggaaggacaccaaatgaaagattgtactgagagacaggctaattttttagggaagatctggccttcccacaagggaaggccagggaattttcttcagagcagaccagagccaacagccccaccagaagagagcttcaggtttggggaagagacaacaactccctctcagaagcaggagccgatagacaaggaactgtatcctttagcttccctcagatcactctttggcagcgacccctcgtcacaataaagataggggggcaattaaaggaagctctattagatacaggagcagatgatacagtattagaagaaatgaatttgccaggaagatggaaaccaaaaatgatagggggaattggaggttttatcaaagtaagacagtatgatcagatactcatagaaatctgcggacataaagctataggtacagtattagtaggacctacacctgtcaacataattggaagaaatctgttgactcagattggctgcactttaaattttcccattagtcctattgagactgtaccagtaaaattaaagccaggaatggatggcccaaaagttaaacaatggccattgacagaagaaaaaataaaagcattagtagaaatttgtacagaaatggaaaaggaaggaaaaatttcaaaaattgggcctgaaaatccatacaatactccagtatttgccataaagaaaaaagacagtactaaatggagaaaattagtagatttcagagaacttaataagagaactcaagatttctgggaagttcaattaggaataccacatcctgcagggttaaaacagaaaaaatcagtaacagtactggatgtgggcgatgcatatttttcagttcccttagataaagacttcaggaagtatactgcatttaccatacctagtataaacaatgagacaccagggattagatatcagtacaatgtgcttccacagggatggaaaggatcaccagcaatattccagtgtagcatgacaaaaatcttagagccttttagaaaacaaaatccagacatagtcatctatcaatacatggatgatttgtatgtaggatctgacttagaaatagggcagcatagaacaaaaatagaggaactgagacaacatctgttgaggtggggatttaccacaccagacaaaaaacatcagaaagaacctccattcctttggatgggttatgaactccatcctgataaatggacagtacagcctatagtgctgccagaaaaggacagctggactgtcaatgacatacagaaattagtgggaaaattgaattgggcaagtcagatttatgcagggattaaagtaaggcaattatgtaaacttcttaggggaaccaaagcactaacagaagtagtaccactaacagaagaagcagagctagaactggcagaaaacagggagattctaaaagaaccggtacatggagtgtattatgacccatcaaaagacttaatagcagaaatacagaagcaggggcaaggccaatggacatatcaaatttatcaagagccatttaaaaatctgaaaacaggaaagtatgcaagaatgaagggtgcccacactaatgatgtgaaacaattaacagaggcagtacaaaaaatagccacagaaagcatagtaatatggggaaagactcctaaatttaaattacccatacaaaaggaaacatgggaagcatggtggacagagtattggcaagccacctggattcctgagtgggagtttgtcaatacccctcccttagtgaagttatggtaccagttagagaaagaacccataataggagcagaaactttctatgtagatggggcagccaatagggaaactaaattaggaaaagcaggatatgtaactgacagaggaagacaaaaagttgtccccctaacggacacaacaaatcagaagactgagttacaagcaattcatctagctttgcaggattcgggattagaagtaaacatagtgacagactcacaatatgcattgggaatcattcaagcacaaccagataagagtgaatcagagttagtcagtcaaataatagagcagttaataaaaaaggaaaaagtctacctggcatgggtaccagcacacaaaggaattggaggaaatgaacaagtagataaattggtcagtgctggaatcaggaaagtactatttttagatggaatagataaggcccaagaagaacatgagaaatatcacagtaattggagagcaatggctagtgattttaacctaccacctgtagtagcaaaagaaatagtagccagctgtgataaatgtcagctaaaaggggaagccatgcatggacaagtagactgtagcccaggaatatggcagctagattgtacacatttagaaggaaaagttatcttggtagcagttcatgtagccagtggatatatagaagcagaagtaattccagcagagacagggcaagaaacagcatacttcctcttaaaattagcaggaagatggccagtaaaaacagtacatacagacaatggcagcaatttcaccagtactacagttaaggccgcctgttggtgggcggggatcaagcaggaatttggcattccctacaatccccaaagtcaaggagtaatagaatctatgaataaagaattaaagaaaattataggacaggtaagagatcaggctgaacatcttaagacagcagtacaaatggcagtattcatccacaattttaaaagaaaaggggggattggggggtacagtgcaggggaaagaatagtagacataatagcaacagacatacaaactaaagaattacaaaaacaaattacaaaaattcaaaattttcgggtttattacagggacagcagagatccagtttggaaaggaccagcaaagctcctctggaaaggtgaaggggcagtagtaatacaagataatagtgacataaaagtagtgccaagaagaaaagcaaagatcatcagggattatggaaaacagatggcaggtgatgattgtgtggcccgtccatgaagggttcgattcttgaacagcgcggtctgttatggcaacggcagattcgtttaatgcaacctataatagtagcaatagtagcattagtagtagcaataataatagcaatagttgtgtggtccatagtaatcatagaatataggaaaatattaagacaaagaaaaatagacaggttaattgatagactaatagaaagagcagaagacagtggcaatgagagtgaaggagaagtatcagcacttgtggagatgggggtggaaatggggcaccatgctccttgggatattgatgatctgtagtgctacagaaaaattgtgggtcacagtctattatggggtacctgtgtggaaggaagcaaccaccactctattttgtgcatcagatgctaaagcatatgatacagaggtacataatgtttgggccacacatgcctgtgtacccacagaccccaacccacaagaagtagtattggtaaatgtgacagaaaattttaacatgtggaaaaatgacatggtagaacagatgcatgaggatataatcagtttatgggatcaaagcctaaagccatgtgtaaaattaaccccactctgtgttagtttaaagtgcactgatttgaagaatgatactaataccaatagtagtagcgggagaatgataatggagaaaggagagataaaaaactgctctttcaatatcagcacaagcataagagataaggtgcagaaagaatatgcattcttttataaacttgatatagtaccaatagataataccagctataggttgataagttgtaacacctcagtcattacacaggcctgtccaaaggtatcctttgagccaattcccatacattattgtgccccggctggttttgcgattctaaaatgtaataataagacgttcaatggaacaggaccatgtacaaatgtcagcacagtacaatgtacacatggaatcaggccagtagtatcaactcaactgctgttaaatggcagtctagcagaagaagatgtagtaattagatctgccaatttcacagacaatgctaaaaccataatagtacagctgaacacatctgtagaaattaattgtacaagacccaacaacaatacaagaaaaagtatccgtatccagaggggaccagggagagcatttgttacaataggaaaaataggaaatatgagacaagcacattgtaacattagtagagcaaaatggaatgccactttaaaacagatagctagcaaattaagagaacaatttggaaataataaaacaataatctttaagcaatcctcaggaggggacccagaaattgtaacgcacagttttaattgtggaggggaatttttctactgtaattcaacacaactgtttaatagtacttggtttaatagtacttggagtactgaagggtcaaataacactgaaggaagtgacacaatcacactcccatgcagaataaaacaatttataaacatgtggcaggaagtaggaaaagcaatgtatgcccctcccatcagtggacaaattagatgttcatcaaatattactgggctgctattaacaagagatggtggtaataacaacaatgggtccgagatcttcagacctggaggaggcgatatgagggacaattggagaagtgaattatataaatataaagtagtaaaaattgaaccattaggagtagcacccaccaaggcaaagagaagagtggtgcagagagaaaaaagagcagtgggaataggagctttgttccttgggttcttgggagcagcaggaagcactatgggcgcagcgtcaatgacgctgacggtacaggccagacaattattgtctgatatagtgcagcagcagaacaatttgctgagggctattgaggcgcaacagcatctgttgcaactcacagtctggggcatcaaacagctccaggcaagaatcctggctgtggaaagatacctaaaggatcaacagctcctggggatttggggttgctctggaaaactcatttgcaccactgctgtgccttggaatgctagttggagtaataaatctctggaacagatttggaataacatgacctggatggagtgggacagagaaattaacaattacacaagcttaatacactccttaattgaagaatcgcaaaaccagcaagaaaagaatgaacaagaattattggaattagataaatgggcaagtttgtggaattggtttaacataacaaattggctgtggtatataaaattattcataatgatagtaggaggcttggtaggtttaagaatagtttttgctgtactttctatagtgaatagagttaggcagggatattcaccattatcgtttcagacccacctcccaatcccgaggggacccgacaggcccgaaggaatagaagaagaaggtggagagagagacagagacagatccattcgattagtgaacggatccttagcacttatctgggacgatctgcggagcctgtgcctcttcagctaccaccgcttgagagacttactcttgattgtaacgaggattgtggaacttctgggacgcagggggtgggaagccctcaaatattggtggaatctcctacagtattggagtcaggaactaaagaatagtgctgttaacttgctcaatgccacagccatagcagtagctgaggggacagatagggttatagaagtattacaagcagcttatagagctattcgccacatacctagaagaataagacagggcttggaaaggattttgctataagatgggtggcaagtggtcaaaaagtagtgtgattggatggcctgctgtaagggaaagaatgagacgagctgagccagcagcagatggggtgggagcagtatctcgagacctagaaaaacatggagcaatcacaagtagcaatacagcagctaacaatgctgcttgtgcctggctagaagcacaagaggaggaagaggtgggttttccagtcacacctcaggtacctttaagaccaatgacttacaaggcagctgtagatcttagccactttttaaaagaaaaggggggactggaagggctaattcactcccaaagaagacaagatatccttaccgtccatgaagggttcgatcgtaaagtgggatagttttttatggcaacggcagattcgttgagcctgcatggaatggatgaccctgagagagaagtgttagagtggaggtttgacagccgcctagcatttcatcacgtggcccgagagctgcatccggagtacttcaagaactgctgacatcgagcttgctacaagggactttccgctggggactttccagggaggcgtggcctgggcgggactggggagtggcgagccctcagatgctgcatataagcagctgctttttgcctgtactgggtctctctggttagaccagatctgagcctgggagctctctggctaactagggaacccactgcttaagcctcaataaagcttgccttgagtgcttcaagtagtgtgtgcccgtctgttgtgtgactctggtaactagagatccctcagacccttttagtcagtgtggaaaatctctagca

SEQ ID NO: 60 - DNA, 8725 bp, Artificial Sequence
  Synthetic Sequence
tggaagggctaatttggtcccaaaaaagacaagagatccttgatctgtggatctaccacacacaaggctacttccctgattggcagaactacacaccagggccagggatcagatatccactgacctttggatggtgcttcaagttagtaccagttgaaccagagcaagtagaagaggccaatgaaggagagaacaacagcttgttacaccctatgagccagcatgggatggaggacccggagggagaagtattagtgtggaagtttgacagcctcctagcatttcgtcacatggcccgagagctgcatccggagtactacaaagactgctgacatcgagctttctacaagggactttccgctggggactttccagggaggtgtggcctgggcgggactggggagtggcgagccctcagatgctacatataagcagctgctttttgcctgtactgggtctctctggttagaccagatctgagcctgggagctctctggctaactagggaacccactgcttaagcctcaataaagcttgccttgagtgctcaaagtagtgtgtgcccgtctgttgtgtgactctggtaactagagatccctcagacccttttagtcagtgtggaaaatctctagcagtggcgcccgaacagggacttgaaagcgaaagtaaagccagaggagatctctcgacgcaggactcggcttgctgaagcgcgcacggcaagaggcgaggggcggcgactggtgagtacgccaaaaattttgactagcggaggctagaaggagagagatgggtgcgagagcgtcggtattaagcgggggagaattagataaatgggaaaaaattcggttaaggccagggggaaagaaacaatataaactaaaacatatagtatgggcaagcagggagctagaacgattcgcagttaatcctggccttttagagacatcagaaggctgtagacaaatactgggacagctacaaccatcccttcagacaggatcagaagaacttagatcattatataatacaatagcagtcctctattgtgtgcatcaaaggatagatgtaaaagacaccaaggaagccttagataagatagaggaagagcaaaacaaaagtaagaaaaaggcacagcaagcagcagctgacacaggaaacaacagccaggtcagccaaaattaccctatagtgcagaacctccaggggcaaatggtacatcaggccatatcacctagaactttaaatgcatgggtaaaagtagtagaagagaaggctttcagcccagaagtaatacccatgttttcagcattatcagaaggagccaccccacaagatttaaataccatgctaaacacagtggggggacatcaagcagccatgcaaatgttaaaagagaccatcaatgaggaagctgcagaatgggatagattgcatccagtgcatgcagggcctattgcaccaggccagatgagagaaccaaggggaagtgacatagcaggaactactagtacccttcaggaacaaataggatggatgacacataatccacctatcccagtaggagaaatctataaaagatggataatcctgggattaaataaaatagtaagaatgtatagccctaccagcattctggacataagacaaggaccaaaggaaccctttagagactatgtagaccgattctataaaactctaagagccgagcaagcttcacaagaggtaaaaaattggatgacagaaaccttgttggtccaaaatgcgaacccagattgtaagactattttaaaagcattgggaccaggagcgacactagaagaaatgatgacagcatgtcagggagtggggggacccggccataaagcaagagttttggctgaagcaatgagccaagtaacaaatccagctaccataatgatacagaaaggcaattttaggaaccaaagaaagactgttaagtgtttcaattgtggcaaagaagggcacatagccaaaaattgcagggcccctaggaaaaagggctgttggaaatgtggaaaggaaggacaccaaatgaaagattgtactgagagacaggctaattttttagggaagatctggccttcccacaagggaaggccagggaattttcttcagagcagaccagagccaacagccccaccagaagagagcttcaggtttggggaagagacaacaactccctctcagaagcaggagccgatagacaaggaactgtatcctttagcttccctcagatcactctttggcagcgacccctcgtcacaataaagataggggggcaattaaaggaagctctattagatacaggagcagatgatacagtattagaagaaatgaatttgccaggaagatggaaaccaaaaatgatagggggaattggaggttttatcaaagtaagacagtatgatcagatactcatagaaatctgcggacataaagctataggtacagtattagtaggacctacacctgtcaacataattggaagaaatctgttgactcagattggctgcactttaaattttcccattagtcctattgagactgtaccagtaaaattaaagccaggaatggatggcccaaaagttaaacaatggccattgacagaagaaaaaataaaagcattagtagaaatttgtacagaaatggaaaaggaaggaaaaatttcaaaaattgggcctgaaaatccatacaatactccagtatttgccataaagaaaaaagacagtactaaatggagaaaattagtagatttcagagaacttaataagagaactcaagatttctgggaagttcaattaggaataccacatcctgcagggttaaaacagaaaaaatcagtaacagtactggatgtgggcgatgcatatttttcagttcccttagataaagacttcaggaagtatactgcatttaccatacctagtataaacaatgagacaccagggattagatatcagtacaatgtgcttccacagggatggaaaggatcaccagcaatattccagtgtagcatgacaaaaatcttagagccttttagaaaacaaaatccagacatagtcatctatcaatacatggatgatttgtatgtaggatctgacttagaaatagggcagcatagaacaaaaatagaggaactgagacaacatctgttgaggtggggatttaccacaccagacaaaaaacatcagaaagaacctccattcctttggatgggttatgaactccatcctgataaatggacagtacagcctatagtgctgccagaaaaggacagctggactgtcaatgacatacagaaattagtgggaaaattgaattgggcaagtcagatttatgcagggattaaagtaaggcaattatgtaaacttcttaggggaaccaaagcactaacagaagtagtaccactaacagaagaagcagagctagaactggcagaaaacagggagattctaaaagaaccggtacatggagtgtattatgacccatcaaaagacttaatagcagaaatacagaagcaggggcaaggccaatggacatatcaaatttatcaagagccatttaaaaatctgaaaacaggaaagtatgcaagaatgaagggtgcccacactaatgatgtgaaacaattaacagaggcagtacaaaaaatagccacagaaagcatagtaatatggggaaagactcctaaatttaaattacccatacaaaaggaaacatgggaagcatggtggacagagtattggcaagccacctggattcctgagtgggagtttgtcaatacccctcccttagtgaagttatggtaccagttagagaaagaacccataataggagcagaaactttctatgtagatggggcagccaatagggaaactaaattaggaaaagcaggatatgtaactgacagaggaagacaaaaagttgtccccctaacggacacaacaaatcagaagactgagttacaagcaattcatctagctttgcaggattcgggattagaagtaaacatagtgacagactcacaatatgcattgggaatcattcaagcacaaccagataagagtgaatcagagttagtcagtcaaataatagagcagttaataaaaaaggaaaaagtctacctggcatgggtaccagcacacaaaggaattggaggaaatgaacaagtagataaattggtcagtgctggaatcaggaaagtactatttttagatggaatagataaggcccaagaagaacatgagaaatatcacagtaattggagagcaatggctagtgattttaacctaccacctgtagtagcaaaagaaatagtagccagctgtgataaatgtcagctaaaaggggaagccatgcatggacaagtagactgtagcccaggaatatggcagctagattgtacacatttagaaggaaaagttatcttggtagcagttcatgtagccagtggatatatagaagcagaagtaattccagcagagacagggcaagaaacagcatacttcctcttaaaattagcaggaagatggccagtaaaaacagtacatacagacaatggcagcaatttcaccagtactacagttaaggccgcctgttggtgggcggggatcaagcaggaatttggcattccctacaatccccaaagtcaaggagtaatagaatctatgaataaagaattaaagaaaattataggacaggtaagagatcaggctgaacatcttaagacagcagtacaaatggcagtattcatccacaattttaaaagaaaaggggggattggggggtacagtgcaggggaaagaatagtagacataatagcaacagacatacaaactaaagaattacaaaaacaaattacaaaaattcaaaattttcgggtttattacagggacagcagagatccagtttggaaaggaccagcaaagctcctctggaaaggtgaaggggcagtagtaatacaagataatagtgacataaaagtagtgccaagaagaaaagcaaagatcatcagggattatggaaaacagatggcaggtgatgattgtgtggctaatgcaacctataatagtagcaatagtagcattagtagtagcaataataatagcaatagttgtgtggtccatagtaatcatagaatataggaaaatattaagacaaagaaaaatagacaggttaattgatagactaatagaaagagcagaagacagtggcaatgagagtgaaggagaagtatcagcacttgtggagatgggggtggaaatggggcaccatgctccttgggatattgatgatctgtagtgctacagaaaaattgtgggtcacagtctattatggggtacctgtgtggaaggaagcaaccaccactctattttgtgcatcagatgctaaagcatatgatacagaggtacataatgtttgggccacacatgcctgtgtacccacagaccccaacccacaagaagtagtattggtaaatgtgacagaaaattttaacatgtggaaaaatgacatggtagaacagatgcatgaggatataatcagtttatgggatcaaagcctaaagccatgtgtaaaattaaccccactctgtgttagtttaaagtgcactgatttgaagaatgatactaataccaatagtagtagcgggagaatgataatggagaaaggagagataaaaaactgctctttcaatatcagcacaagcataagagataaggtgcagaaagaatatgcattcttttataaacttgatatagtaccaatagataataccagctataggttgataagttgtaacacctcagtcattacacaggcctgtccaaaggtatcctttgagccaattcccatacattattgtgccccggctggttttgcgattctaaaatgtaataataagacgttcaatggaacaggaccatgtacaaatgtcagcacagtacaatgtacacatggaatcaggccagtagtatcaactcaactgctgttaaatggcagtctagcagaagaagatgtagtaattagatctgccaatttcacagacaatgctaaaaccataatagtacagctgaacacatctgtagaaattaattgtacaagacccaacaacaatacaagaaaaagtatccgtatccagaggggaccagggagagcatttgttacaataggaaaaataggaaatatgagacaagcacattgtaacattagtagagcaaaatggaatgccactttaaaacagatagctagcaaattaagagaacaatttggaaataataaaacaataatctttaagcaatcctcaggaggggacccagaaattgtaacgcacagttttaattgtggaggggaatttttctactgtaattcaacacaactgtttaatagtacttggtttaatagtacttggagtactgaagggtcaaataacactgaaggaagtgacacaatcacactcccatgcagaataaaacaatttataaacatgtggcaggaagtaggaaaagcaatgtatgcccctcccatcagtggacaaattagatgttcatcaaatattactgggctgctattaacaagagatggtggtaataacaacaatgggtccgagatcttcagacctggaggaggcgatatgagggacaattggagaagtgaattatataaatataaagtagtaaaaattgaaccattaggagtagcacccaccaaggcaaagagaagagtggtgcagagagaaaaaagagcagtgggaataggagctttgttccttgggttcttgggagcagcaggaagcactatgggcgcagcgtcaatgacgctgacggtacaggccagacaattattgtctgatatagtgcagcagcagaacaatttgctgagggctattgaggcgcaacagcatctgttgcaactcacagtctggggcatcaaacagctccaggcaagaatcctggctgtggaaagatacctaaaggatcaacagctcctggggatttggggttgctctggaaaactcatttgcaccactgctgtgccttggaatgctagttggagtaataaatctctggaacagatttggaataacatgacctggatggagtgggacagagaaattaacaattacacaagcttaatacactccttaattgaagaatcgcaaaaccagcaagaaaagaatgaacaagaattattggaattagataaatgggcaagtttgtggaattggtttaacataacaaattggctgtggtatataaaattattcataatgatagtaggaggcttggtaggtttaagaatagtttttgctgtactttctatagtgaatagagttaggcagggatattcaccattatcgtttcagacccacctcccaatcccgaggggacccgacaggcccgaaggaatagaagaagaaggtggagagagagacagagacagatccattcgattagtgaacggatccttagcacttatctgggacgatctgcggagcctgtgcctcttcagctaccaccgcttgagagacttactcttgattgtaacgaggattgtggaacttctgggacgcagggggtgggaagccctcaaatattggtggaatctcctacagtattggagtcaggaactaaagaatagtgctgttaacttgctcaatgccacagccatagcagtagctgaggggacagatagggttatagaagtattacaagcagcttatagagctattcgccacatacctagaagaataagacagggcttggaaaggattttgctataagatgggtggcaagtggtcaaaaagtagtgtgattggatggcctgctgtaagggaaagaatgagacgagctgagccagcagcagatggggtgggagcagtatctcgagacctagaaaaacatggagcaatcacaagtagcaatacagcagctaacaatgctgcttgtgcctggctagaagcacaagaggaggaagaggtgggttttccagtcacacctcaggtacctttaagaccaatgacttacaaggcagctgtagatcttagccactttttaaaagaaaaggggggactggaagggctaattcactcccaaagaagacaagatatccttgatctgtggatctaccacacacaaggctacttccctgattggcagaactacacaccagggccaggggtcagatatccactgacctttggatggtgctacaagctagtaccagttgagccagataaggtagaagaggccaataaaggagagaacaccagcttgttacaccctgtgagcctgcatggaatggatgaccctgagagagaagtgttagagtggaggtttgacagccgcctagcatttcatcacgtggcccgagagctgcatccggagtacttcaagaactgctgacatcgagcttgctacaagggactttccgctggggactttccagggaggcgtggcctgggcgggactggggagtggcgagccctcagatgctgcatataagcagctgctttttgcctgtactgggtctctctggttagaccagatctgagcctgggagctctctggctaactagggaacccactgcttaagcctcaataaagcttgccttgagtgcttcaagtagtgtgtgcccgtctgttgtgtgactctggtaactagagatccctcagacccttttagtcagtgtggaaaatctctagca

SEQ ID NO: 61 - DNA, 8614 bp, Artificial Sequence
  Synthetic Sequence
tggaagggctaatttggtcccaaaaaagacaagagatccttgatctgtggatctaccacacacaaggctacttccctgattggcagaactacacaccagggccagggatcagatatccactgacctttggatggtgcttcaagttagtaccagttgaaccagagcaagtagaagaggccaatgaaggagagaacaacagcttgttacaccctatgagccagcatgggatggaggacccggagggagaagtattagtgtggaagtttgacagcctcctagcatttcgtcacatggcccgagagctgcatccggagtactacaaagactgctgacatcgagctttctacaagggactttccgctggggactttccagggaggtgtggcctgggcgggactggggagtggcgagccctcagatgctacatataagcagctgctttttgcctgtactgggtctctctggttagaccagatctgagcctgggagctctctggctaactagggaacccactgcttaagcctcaataaagcttgccttgagtgctcaaagtagtgtgtgcccgtctgttgtgtgactctggtaactagagatccctcagacccttttagtcagtgtggaaaatctctagcagtggcgcccgaacagggacttgaaagcgaaagtaaagccagaggagatctctcgacgcaggactcggcttgctgaagcgcgcacggcaagaggcgaggggcggcgactggtgagtacgccaaaaattttgactagcggaggctagaaggagagagatgggtgcgagagcgtcggtattaagcgggggagaattagataaatgggaaaaaattcggttaaggccagggggaaagaaacaatataaactaaaacatatagtatgggcaagcagggagctagaacgattcgcagttaatcctggccttttagagacatcagaaggctgtagacaaatactgggacagctacaaccatcccttcagacaggatcagaagaacttagatcattatataatacaatagcagtcctctattgtgtgcatcaaaggatagatgtaaaagacaccaaggaagccttagataagatagaggaagagcaaaacaaaagtaagaaaaaggcacagcaagcagcagctgacacaggaaacaacagccaggtcagccaaaattaccctatagtgcagaacctccaggggcaaatggtacatcaggccatatcacctagaactttaaatgcatgggtaaaagtagtagaagagaaggctttcagcccagaagtaatacccatgttttcagcattatcagaaggagccaccccacaagatttaaataccatgctaaacacagtggggggacatcaagcagccatgcaaatgttaaaagagaccatcaatgaggaagctgcagaatgggatagattgcatccagtgcatgcagggcctattgcaccaggccagatgagagaaccaaggggaagtgacatagcaggaactactagtacccttcaggaacaaataggatggatgacacataatccacctatcccagtaggagaaatctataaaagatggataatcctgggattaaataaaatagtaagaatgtatagccctaccagcattctggacataagacaaggaccaaaggaaccctttagagactatgtagaccgattctataaaactctaagagccgagcaagcttcacaagaggtaaaaaattggatgacagaaaccttgttggtccaaaatgcgaacccagattgtaagactattttaaaagcattgggaccaggagcgacactagaagaaatgatgacagcatgtcagggagtggggggacccggccataaagcaagagttttggctgaagcaatgagccaagtaacaaatccagctaccataatgatacagaaaggcaattttaggaaccaaagaaagactgttaagtgtttcaattgtggcaaagaagggcacatagccaaaaattgcagggcccctaggaaaaagggctgttggaaatgtggaaaggaaggacaccaaatgaaagattgtactgagagacaggctaattttttagggaagatctggccttcccacaagggaaggccagggaattttcttcagagcagaccagagccaacagccccaccagaagagagcttcaggtttggggaagagacaacaactccctctcagaagcaggagccgatagacaaggaactgtatcctttagcttccctcagatcactctttggcagcgacccctcgtcacaataaagataggggggcaattaaaggaagctctattagatacaggagcagatgatacagtattagaagaaatgaatttgccaggaagatggaaaccaaaaatgatagggggaattggaggttttatcaaagtaagacagtatgatcagatactcatagaaatctgcggacataaagctataggtacagtattagtaggacctacacctgtcaacataattggaagaaatctgttgactcagattggctgcactttaaattttcccattagtcctattgagactgtaccagtaaaattaaagccaggaatggatggcccaaaagttaaacaatggccattgacagaagaaaaaataaaagcattagtagaaatttgtacagaaatggaaaaggaaggaaaaatttcaaaaattgggcctgaaaatccatacaatactccagtatttgccataaagaaaaaagacagtactaaatggagaaaattagtagatttcagagaacttaataagagaactcaagatttctgggaagttcaattaggaataccacatcctgcagggttaaaacagaaaaaatcagtaacagtactggatgtgggcgatgcatatttttcagttcccttagataaagacttcaggaagtatactgcatttaccatacctagtataaacaatgagacaccagggattagatatcagtacaatgtgcttccacagggatggaaaggatcaccagcaatattccagtgtagcatgacaaaaatcttagagccttttagaaaacaaaatccagacatagtcatctatcaatacatggatgatttgtatgtaggatctgacttagaaatagggcagcatagaacaaaaatagaggaactgagacaacatctgttgaggtggggatttaccacaccagacaaaaaacatcagaaagaacctccattcctttggatgggttatgaactccatcctgataaatggacagtacagcctatagtgctgccagaaaaggacagctggactgtcaatgacatacagaaattagtgggaaaattgaattgggcaagtcagatttatgcagggattaaagtaaggcaattatgtaaacttcttaggggaaccaaagcactaacagaagtagtaccactaacagaagaagcagagctagaactggcagaaaacagggagattctaaaagaaccggtacatggagtgtattatgacccatcaaaagacttaatagcagaaatacagaagcaggggcaaggccaatggacatatcaaatttatcaagagccatttaaaaatctgaaaacaggaaagtatgcaagaatgaagggtgcccacactaatgatgtgaaacaattaacagaggcagtacaaaaaatagccacagaaagcatagtaatatggggaaagactcctaaatttaaattacccatacaaaaggaaacatgggaagcatggtggacagagtattggcaagccacctggattcctgagtgggagtttgtcaatacccctcccttagtgaagttatggtaccagttagagaaagaacccataataggagcagaaactttctatgtagatggggcagccaatagggaaactaaattaggaaaagcaggatatgtaactgacagaggaagacaaaaagttgtccccctaacggacacaacaaatcagaagactgagttacaagcaattcatctagctttgcaggattcgggattagaagtaaacatagtgacagactcacaatatgcattgggaatcattcaagcacaaccagataagagtgaatcagagttagtcagtcaaataatagagcagttaataaaaaaggaaaaagtctacctggcatgggtaccagcacacaaaggaattggaggaaatgaacaagtagataaattggtcagtgctggaatcaggaaagtactatttttagatggaatagataaggcccaagaagaacatgagaaatatcacagtaattggagagcaatggctagtgattttaacctaccacctgtagtagcaaaagaaatagtagccagctgtgataaatgtcagctaaaaggggaagccatgcatggacaagtagactgtagcccaggaatatggcagctagattgtacacatttagaaggaaaagttatcttggtagcagttcatgtagccagtggatatatagaagcagaagtaattccagcagagacagggcaagaaacagcatacttcctcttaaaattagcaggaagatggccagtaaaaacagtacatacagacaatggcagcaatttcaccagtactacagttaaggccgcctgttggtgggcggggatcaagcaggaatttggcattccctacaatccccaaagtcaaggagtaatagaatctatgaataaagaattaaagaaaattataggacaggtaagagatcaggctgaacatcttaagacagcagtacaaatggcagtattcatccacaattttaaaagaaaaggggggattggggggtacagtgcaggggaaagaatagtagacataatagcaacagacatacaaactaaagaattacaaaaacaaattacaaaaattcaaaattttcgggtttattacagggacagcagagatccagtttggaaaggaccagcaaagctcctctggaaaggtgaaggggcagtagtaatacaagataatagtgacataaaagtagtgccaagaagaaaagcaaagatcatcagggattatggaaaacagatggcaggtgatgattgtgtggctaatgcaacctataatagtagcaatagtagcattagtagtagcaataataatagcaatagttgtgtggtccatagtaatcatagaatataggaaaatattaagacaaagaaaaatagacaggttaattgatagactaatagaaagagcagaagacagtggcaatgagagtgaaggagaagtatcagcacttgtggagatgggggtggaaatggggcaccatgctccttgggatattgatgatctgtagtgctacagaaaaattgtgggtcacagtctattatggggtacctgtgtggaaggaagcaaccaccactctattttgtgcatcagatgctaaagcatatgatacagaggtacataatgtttgggccacacatgcctgtgtacccacagaccccaacccacaagaagtagtattggtaaatgtgacagaaaattttaacatgtggaaaaatgacatggtagaacagatgcatgaggatataatcagtttatgggatcaaagcctaaagccatgtgtaaaattaaccccactctgtgttagtttaaagtgcactgatttgaagaatgatactaataccaatagtagtagcgggagaatgataatggagaaaggagagataaaaaactgctctttcaatatcagcacaagcataagagataaggtgcagaaagaatatgcattcttttataaacttgatatagtaccaatagataataccagctataggttgataagttgtaacacctcagtcattacacaggcctgtccaaaggtatcctttgagccaattcccatacattattgtgccccggctggttttgcgattctaaaatgtaataataagacgttcaatggaacaggaccatgtacaaatgtcagcacagtacaatgtacacatggaatcaggccagtagtatcaactcaactgctgttaaatggcagtctagcagaagaagatgtagtaattagatctgccaatttcacagacaatgctaaaaccataatagtacagctgaacacatctgtagaaattaattgtacaagacccaacaacaatacaagaaaaagtatccgtatccagaggggaccagggagagcatttgttacaataggaaaaataggaaatatgagacaagcacattgtaacattagtagagcaaaatggaatgccactttaaaacagatagctagcaaattaagagaacaatttggaaataataaaacaataatctttaagcaatcctcaggaggggacccagaaattgtaacgcacagttttaattgtggaggggaatttttctactgtaattcaacacaactgtttaatagtacttggtttaatagtacttggagtactgaagggtcaaataacactgaaggaagtgacacaatcacactcccatgcagaataaaacaatttataaacatgtggcaggaagtaggaaaagcaatgtatgcccctcccatcagtggacaaattagatgttcatcaaatattactgggctgctattaacaagagatggtggtaataacaacaatgggtccgagatcttcagacctggaggaggcgatatgagggacaattggagaagtgaattatataaatataaagtagtaaaaattgaaccattaggagtagcacccaccaaggcaaagagaagagtggtgcagagagaaaaaagagcagtgggaataggagctttgttccttgggttcttgggagcagcaggaagcactatgggcgcagcgtcaatgacgctgacggtacaggccagacaattattgtctgatatagtgcagcagcagaacaatttgctgagggctattgaggcgcaacagcatctgttgcaactcacagtctggggcatcaaacagctccaggcaagaatcctggctgtggaaagatacctaaaggatcaacagctcctggggatttggggttgctctggaaaactcatttgcaccactgctgtgccttggaatgctagttggagtaataaatctctggaacagatttggaataacatgacctggatggagtgggacagagaaattaacaattacacaagcttaatacactccttaattgaagaatcgcaaaaccagcaagaaaagaatgaacaagaattattggaattagataaatgggcaagtttgtggaattggtttaacataacaaattggctgtggtatataaaattattcataatgatagtaggaggcttggtaggtttaagaatagtttttgctgtactttctatagtgaatagagttaggcagggatattcaccattatcgtttcagacccacctcccaatcccgaggggacccgacaggcccgaaggaatagaagaagaaggtggagagagagacagagacagatccattcgattagtgaacggatccttagcacttatctgggacgatctgcggagcctgtgcctcttcagctaccaccgcttgagagacttactcttgattgtaacgaggattgtggaacttctgggacgcagggggtgggaagccctcaaatattggtggaatctcctacagtattggagtcaggaactaaagaatagtgctgttaacttgctcaatgccacagccatagcagtagctgaggggacagatagggttatagaagtattacaagcagcttatagagctattcgccacatacctagaagaataagacagggcttggaaaggattttgctataagatgggtggcaagtggtcaaaaagtagtgtgattggatggcctgctgtaagggaaagaatgagacgagctgagccagcagcagatggggtgggagcagtatctcgagacctagaaaaacatggagcaatcacaagtagcaatacagcagctaacaatgctgcttgtgcctggctagaagcacaagaggaggaagaggtgggttttccagtcacacctcaggtacctttaagaccaatgacttacaaggcagctgtagatcttagccactttttaaaagaaaaggggggactggaagggctaattcactcccaaagaagacaagatatccttaccgtccatgaagggttcgatcgtaaagtgggatagttttttatggcaacggcagattcgttgagcctgcatggaatggatgaccctgagagagaagtgttagagtggaggtttgacagccgcctagcatttcatcacgtggcccgagagctgcatccggagtacttcaagaactgctgacatcgagcttgctacaagggactttccgctggggactttccagggaggcgtggcctgggcgggactggggagtggcgagccctcagatgctgcatataagcagctgctttttgcctgtactgggtctctctggttagaccagatctgagcctgggagctctctggctaactagggaacccactgcttaagcctcaataaagcttgccttgagtgcttcaagtagtgtgtgcccgtctgttgtgtgactctggtaactagagatccctcagacccttttagtcagtgtggaaaatctctagca

SEQ ID NO: 62 - DNA, 8683 bp, Artificial Sequence
  Synthetic Sequence
tggaagggctaatttggtcccaaaaaagacaagagatccttgatctgtggatctaccacacacaaggctacttccctgattggcagaactacacaccagggccagggatcagatatccactgacctttggatggtgcttcaagttagtaccagttgaaccagagcaagtagaagaggccaatgaaggagagaacaacagcttgttacaccctatgagccagcatgggatggaggacccggagggagaagtattagtgtggaagtttgacagcctcctagcatttcgtcacatggcccgagagctgcatccggagtactacaaagactgctgacatcgagctttctacaagggactttccgctggggactttccagggaggtgtggcctgggcgggactggggagtggcgagccctcagatgctacatataagcagctgctttttgcctgtactgggtctctctggttagaccagatctgagcctgggagctctctggctaactagggaacccactgcttaagcctcaataaagcttgccttgagtgctcaaagtagtgtgtgcccgtctgttgtgtgactctggtaactagagatccctcagacccttttagtcagtgtggaaaatctctagcagtggcgcccgaacagggacttgaaagcgaaagtaaagccagaggagatctctcgacgcaggactcggcttgctgaagcgcgcacggcaagaggcgaggggcggcgactggtgagtacgccaaaaattttgactagcggaggctagaaggagagagatgggtgcgagagcgtcggtattaagcgggggagaattagataaatgggaaaaaattcggttaaggccagggggaaagaaacaatataaactaaaacatatagtatgggcaagcagggagctagaacgattcgcagttaatcctggccttttagagacatcagaaggctgtagacaaatactgggacagctacaaccatcccttcagacaggatcagaagaacttagatcattatataatacaatagcagtcctctattgtgtgcatcaaaggatagatgtaaaagacaccaaggaagccttagataagatagaggaagagcaaaacaaaagtaagaaaaaggcacagcaagcagcagctgacacaggaaacaacagccaggtcagccaaaattaccctatagtgcagaacctccaggggcaaatggtacatcaggccatatcacctagaactttaaatgcatgggtaaaagtagtagaagagaaggctttcagcccagaagtaatacccatgttttcagcattatcagaaggagccaccccacaagatttaaataccatgctaaacacagtggggggacatcaagcagccatgcaaatgttaaaagagaccatcaatgaggaagctgcagaatgggatagattgcatccagtgcatgcagggcctattgcaccaggccagatgagagaaccaaggggaagtgacatagcaggaactactagtacccttcaggaacaaataggatggatgacacataatccacctatcccagtaggagaaatctataaaagatggataatcctgggattaaataaaatagtaagaatgtatagccctaccagcattctggacataagacaaggaccaaaggaaccctttagagactatgtagaccgattctataaaactctaagagccgagcaagcttcacaagaggtaaaaaattggatgacagaaaccttgttggtccaaaatgcgaacccagattgtaagactattttaaaagcattgggaccaggagcgacactagaagaaatgatgacagcatgtcagggagtggggggacccggccataaagcaagagttttggctgaagcaatgagccaagtaacaaatccagctaccataatgatacagaaaggcaattttaggaaccaaagaaagactgttaagtgtttcaattgtggcaaagaagggcacatagccaaaaattgcagggcccctaggaaaaagggctgttggaaatgtggaaaggaaggacaccaaatgaaagattgtactgagagacaggctaattttttagggaagatctggccttcccacaagggaaggccagggaattttcttcagagcagaccagagccaacagccccaccagaagagagcttcaggtttggggaagagacaacaactccctctcagaagcaggagccgatagacaaggaactgtatcctttagcttccctcagatcactctttggcagcgacccctcgtcacaataaagataggggggcaattaaaggaagctctattagatacaggagcagatgatacagtattagaagaaatgaatttgccaggaagatggaaaccaaaaatgatagggggaattggaggttttatcaaagtaagacagtatgatcagatactcatagaaatctgcggacataaagctataggtacagtattagtaggacctacacctgtcaacataattggaagaaatctgttgactcagattggctgcactttaaattttcccattagtcctattgagactgtaccagtaaaattaaagccaggaatggatggcccaaaagttaaacaatggccattgacagaagaaaaaataaaagcattagtagaaatttgtacagaaatggaaaaggaaggaaaaatttcaaaaattgggcctgaaaatccatacaatactccagtatttgccataaagaaaaaagacagtactaaatggagaaaattagtagatttcagagaacttaataagagaactcaagatttctgggaagttcaattaggaataccacatcctgcagggttaaaacagaaaaaatcagtaacagtactggatgtgggcgatgcatatttttcagttcccttagataaagacttcaggaagtatactgcatttaccatacctagtataaacaatgagacaccagggattagatatcagtacaatgtgcttccacagggatggaaaggatcaccagcaatattccagtgtagcatgacaaaaatcttagagccttttagaaaacaaaatccagacatagtcatctatcaatacatggatgatttgtatgtaggatctgacttagaaatagggcagcatagaacaaaaatagaggaactgagacaacatctgttgaggtggggatttaccacaccagacaaaaaacatcagaaagaacctccattcctttggatgggttatgaactccatcctgataaatggacagtacagcctatagtgctgccagaaaaggacagctggactgtcaatgacatacagaaattagtgggaaaattgaattgggcaagtcagatttatgcagggattaaagtaaggcaattatgtaaacttcttaggggaaccaaagcactaacagaagtagtaccactaacagaagaagcagagctagaactggcagaaaacagggagattctaaaagaaccggtacatggagtgtattatgacccatcaaaagacttaatagcagaaatacagaagcaggggcaaggccaatggacatatcaaatttatcaagagccatttaaaaatctgaaaacaggaaagtatgcaagaatgaagggtgcccacactaatgatgtgaaacaattaacagaggcagtacaaaaaatagccacagaaagcatagtaatatggggaaagactcctaaatttaaattacccatacaaaaggaaacatgggaagcatggtggacagagtattggcaagccacctggattcctgagtgggagtttgtcaatacccctcccttagtgaagttatggtaccagttagagaaagaacccataataggagcagaaactttctatgtagatggggcagccaatagggaaactaaattaggaaaagcaggatatgtaactgacagaggaagacaaaaagttgtccccctaacggacacaacaaatcagaagactgagttacaagcaattcatctagctttgcaggattcgggattagaagtaaacatagtgacagactcacaatatgcattgggaatcattcaagcacaaccagataagagtgaatcagagttagtcagtcaaataatagagcagttaataaaaaaggaaaaagtctacctggcatgggtaccagcacacaaaggaattggaggaaatgaacaagtagataaattggtcagtgctggaatcaggaaagtactatttttagatggaatagataaggcccaagaagaacatgagaaatatcacagtaattggagagcaatggctagtgattttaacctaccacctgtagtagcaaaagaaatagtagccagctgtgataaatgtcagctaaaaggggaagccatgcatggacaagtagactgtagcccaggaatatggcagctagattgtacacatttagaaggaaaagttatcttggtagcagttcatgtagccagtggatatatagaagcagaagtaattccagcagagacagggcaagaaacagcatacttcctcttaaaattagcaggaagatggccagtaaaaacagtacatacagacaatggcagcaatttcaccagtactacagttaaggccgcctgttggtgggcggggatcaagcaggaatttggcattccctacaatccccaaagtcaaggagtaatagaatctatgaataaagaattaaagaaaattataggacaggtaagagatcaggctgaacatcttaagacagcagtacaaatggcagtattcatccacaattttaaaagaaaaggggggattggggggtacagtgcaggggaaagaatagtagacataatagcaacagacatacaaactaaagaattacaaaaacaaattacaaaaattcaaaattttcgggtttattacagggacagcagagatccagtttggaaaggaccagcaaagctcctctggaaaggtgaaggggcagtagtaatacaagataatagtgacataaaagtagtgccaagaagaaaagcaaagatcatcagggattatggaaaacagatggcaggtgatgattgtgtaccgtccatgaagggttcgatgatcggtcgtcgcagcggtctatggcaacggcagattcgttagacaaagaaaaatagacaggttaattgatagactaatagaaagagcagaagacagtggcaatgagagtgaaggagaagtatcagcacttgtggagatgggggtggaaatggggcaccatgctccttgggatattgatgatctgtagtgctacagaaaaattgtgggtcacagtctattatggggtacctgtgtggaaggaagcaaccaccactctattttgtgcatcagatgctaaagcatatgatacagaggtacataatgtttgggccacacatgcctgtgtacccacagaccccaacccacaagaagtagtattggtaaatgtgacagaaaattttaacatgtggaaaaatgacatggtagaacagatgcatgaggatataatcagtttatgggatcaaagcctaaagccatgtgtaaaattaaccccactctgtgttagtttaaagtgcactgatttgaagaatgatactaataccaatagtagtagcgggagaatgataatggagaaaggagagataaaaaactgctctttcaatatcagcacaagcataagagataaggtgcagaaagaatatgcattcttttataaacttgatatagtaccaatagataataccagctataggttgataagttgtaacacctcagtcattacacaggcctgtccaaaggtatcctttgagccaattcccatacattattgtgccccggctggttttgcgattctaaaatgtaataataagacgttcaatggaacaggaccatgtacaaatgtcagcacagtacaatgtacacatggaatcaggccagtagtatcaactcaactgctgttaaatggcagtctagcagaagaagatgtagtaattagatctgccaatttcacagacaatgctaaaaccataatagtacagctgaacacatctgtagaaattaattgtacaagacccaacaacaatacaagaaaaagtatccgtatccagaggggaccagggagagcatttgttacaataggaaaaataggaaatatgagacaagcacattgtaacattagtagagcaaaatggaatgccactttaaaacagatagctagcaaattaagagaacaatttggaaataataaaacaataatctttaagcaatcctcaggaggggacccagaaattgtaacgcacagttttaattgtggaggggaatttttctactgtaattcaacacaactgtttaatagtacttggtttaatagtacttggagtactgaagggtcaaataacactgaaggaagtgacacaatcacactcccatgcagaataaaacaatttataaacatgtggcaggaagtaggaaaagcaatgtatgcccctcccatcagtggacaaattagatgttcatcaaatattactgggctgctattaacaagagatggtggtaataacaacaatgggtccgagatcttcagacctggaggaggcgatatgagggacaattggagaagtgaattatataaatataaagtagtaaaaattgaaccattaggagtagcacccaccaaggcaaagagaagagtggtgcagagagaaaaaagagcagtgggaataggagctttgttccttgggttcttgggagcagcaggaagcactatgggcgcagcgtcaatgacgctgacggtacaggccagacaattattgtctgatatagtgcagcagcagaacaatttgctgagggctattgaggcgcaacagcatctgttgcaactcacagtctggggcatcaaacagctccaggcaagaatcctggctgtggaaagatacctaaaggatcaacagctcctggggatttggggttgctctggaaaactcatttgcaccactgctgtgccttggaatgctagttggagtaataaatctctggaacagatttggaataacatgacctggatggagtgggacagagaaattaacaattacacaagcttaatacactccttaattgaagaatcgcaaaaccagcaagaaaagaatgaacaagaattattggaattagataaatgggcaagtttgtggaattggtttaacataacaaattggctgtggtatataaaattattcataatgatagtaggaggcttggtaggtttaagaatagtttttgctgtactttctatagtgaatagagttaggcagggatattcaccattatcgtttcagacccacctcccaatcccgaggggacccgacaggcccgaaggaatagaagaagaaggtggagagagagacagagacagatccattcgattagtgaacggatccttagcacttatctgggacgatctgcggagcctgtgcctcttcagctaccaccgcttgagagacttactcttgattgtaacgaggattgtggaacttctgggacgcagggggtgggaagccctcaaatattggtggaatctcctacagtattggagtcaggaactaaagaatagtgctgttaacttgctcaatgccacagccatagcagtagctgaggggacagatagggttatagaagtattacaagcagcttatagagctattcgccacatacctagaagaataagacagggcttggaaaggattttgctataagatgggtggcaagtggtcaaaaagtagtgtgattggatggcctgctgtaagggaaagaatgagacgagctgagccagcagcagatggggtgggagcagtatctcgagacctagaaaaacatggagcaatcacaagtagcaatacagcagctaacaatgctgcttgtgcctggctagaagcacaagaggaggaagaggtgggttttccagtcacacctcaggtacctttaagaccaatgacttacaaggcagctgtagatcttagccactttttaaaagaaaaggggggactggaagggctaattcactcccaaagaagacaagatatccttgatctgtggatctaccacacacaaggctacttccctgattggcagaactacacaccagggccaggggtcagatatccactgacctttggatggtgctacaagctagtaccagttgagccagataaggtagaagaggccaataaaggagagaacaccagcttgttacaccctgtgagcctgcatggaatggatgaccctgagagagaagtgttagagtggaggtttgacagccgcctagcatttcatcacgtggcccgagagctgcatccggagtacttcaagaactgctgacatcgagcttgctacaagggactttccgctggggactttccagggaggcgtggcctgggcgggactggggagtggcgagccctcagatgctgcatataagcagctgctttttgcctgtactgggtctctctggttagaccagatctgagcctgggagctctctggctaactagggaacccactgcttaagcctcaataaagcttgccttgagtgcttcaagtagtgtgtgcccgtctgttgtgtgactctggtaactagagatccctcagacccttttagtcagtgtggaaaatctctagca

SEQ ID NO: 63 - DNA, 8572 bp, Artificial Sequence
  Synthetic Sequence
tggaagggctaatttggtcccaaaaaagacaagagatccttgatctgtggatctaccacacacaaggctacttccctgattggcagaactacacaccagggccagggatcagatatccactgacctttggatggtgcttcaagttagtaccagttgaaccagagcaagtagaagaggccaatgaaggagagaacaacagcttgttacaccctatgagccagcatgggatggaggacccggagggagaagtattagtgtggaagtttgacagcctcctagcatttcgtcacatggcccgagagctgcatccggagtactacaaagactgctgacatcgagctttctacaagggactttccgctggggactttccagggaggtgtggcctgggcgggactggggagtggcgagccctcagatgctacatataagcagctgctttttgcctgtactgggtctctctggttagaccagatctgagcctgggagctctctggctaactagggaacccactgcttaagcctcaataaagcttgccttgagtgctcaaagtagtgtgtgcccgtctgttgtgtgactctggtaactagagatccctcagacccttttagtcagtgtggaaaatctctagcagtggcgcccgaacagggacttgaaagcgaaagtaaagccagaggagatctctcgacgcaggactcggcttgctgaagcgcgcacggcaagaggcgaggggcggcgactggtgagtacgccaaaaattttgactagcggaggctagaaggagagagatgggtgcgagagcgtcggtattaagcgggggagaattagataaatgggaaaaaattcggttaaggccagggggaaagaaacaatataaactaaaacatatagtatgggcaagcagggagctagaacgattcgcagttaatcctggccttttagagacatcagaaggctgtagacaaatactgggacagctacaaccatcccttcagacaggatcagaagaacttagatcattatataatacaatagcagtcctctattgtgtgcatcaaaggatagatgtaaaagacaccaaggaagccttagataagatagaggaagagcaaaacaaaagtaagaaaaaggcacagcaagcagcagctgacacaggaaacaacagccaggtcagccaaaattaccctatagtgcagaacctccaggggcaaatggtacatcaggccatatcacctagaactttaaatgcatgggtaaaagtagtagaagagaaggctttcagcccagaagtaatacccatgttttcagcattatcagaaggagccaccccacaagatttaaataccatgctaaacacagtggggggacatcaagcagccatgcaaatgttaaaagagaccatcaatgaggaagctgcagaatgggatagattgcatccagtgcatgcagggcctattgcaccaggccagatgagagaaccaaggggaagtgacatagcaggaactactagtacccttcaggaacaaataggatggatgacacataatccacctatcccagtaggagaaatctataaaagatggataatcctgggattaaataaaatagtaagaatgtatagccctaccagcattctggacataagacaaggaccaaaggaaccctttagagactatgtagaccgattctataaaactctaagagccgagcaagcttcacaagaggtaaaaaattggatgacagaaaccttgttggtccaaaatgcgaacccagattgtaagactattttaaaagcattgggaccaggagcgacactagaagaaatgatgacagcatgtcagggagtggggggacccggccataaagcaagagttttggctgaagcaatgagccaagtaacaaatccagctaccataatgatacagaaaggcaattttaggaaccaaagaaagactgttaagtgtttcaattgtggcaaagaagggcacatagccaaaaattgcagggcccctaggaaaaagggctgttggaaatgtggaaaggaaggacaccaaatgaaagattgtactgagagacaggctaattttttagggaagatctggccttcccacaagggaaggccagggaattttcttcagagcagaccagagccaacagccccaccagaagagagcttcaggtttggggaagagacaacaactccctctcagaagcaggagccgatagacaaggaactgtatcctttagcttccctcagatcactctttggcagcgacccctcgtcacaataaagataggggggcaattaaaggaagctctattagatacaggagcagatgatacagtattagaagaaatgaatttgccaggaagatggaaaccaaaaatgatagggggaattggaggttttatcaaagtaagacagtatgatcagatactcatagaaatctgcggacataaagctataggtacagtattagtaggacctacacctgtcaacataattggaagaaatctgttgactcagattggctgcactttaaattttcccattagtcctattgagactgtaccagtaaaattaaagccaggaatggatggcccaaaagttaaacaatggccattgacagaagaaaaaataaaagcattagtagaaatttgtacagaaatggaaaaggaaggaaaaatttcaaaaattgggcctgaaaatccatacaatactccagtatttgccataaagaaaaaagacagtactaaatggagaaaattagtagatttcagagaacttaataagagaactcaagatttctgggaagttcaattaggaataccacatcctgcagggttaaaacagaaaaaatcagtaacagtactggatgtgggcgatgcatatttttcagttcccttagataaagacttcaggaagtatactgcatttaccatacctagtataaacaatgagacaccagggattagatatcagtacaatgtgcttccacagggatggaaaggatcaccagcaatattccagtgtagcatgacaaaaatcttagagccttttagaaaacaaaatccagacatagtcatctatcaatacatggatgatttgtatgtaggatctgacttagaaatagggcagcatagaacaaaaatagaggaactgagacaacatctgttgaggtggggatttaccacaccagacaaaaaacatcagaaagaacctccattcctttggatgggttatgaactccatcctgataaatggacagtacagcctatagtgctgccagaaaaggacagctggactgtcaatgacatacagaaattagtgggaaaattgaattgggcaagtcagatttatgcagggattaaagtaaggcaattatgtaaacttcttaggggaaccaaagcactaacagaagtagtaccactaacagaagaagcagagctagaactggcagaaaacagggagattctaaaagaaccggtacatggagtgtattatgacccatcaaaagacttaatagcagaaatacagaagcaggggcaaggccaatggacatatcaaatttatcaagagccatttaaaaatctgaaaacaggaaagtatgcaagaatgaagggtgcccacactaatgatgtgaaacaattaacagaggcagtacaaaaaatagccacagaaagcatagtaatatggggaaagactcctaaatttaaattacccatacaaaaggaaacatgggaagcatggtggacagagtattggcaagccacctggattcctgagtgggagtttgtcaatacccctcccttagtgaagttatggtaccagttagagaaagaacccataataggagcagaaactttctatgtagatggggcagccaatagggaaactaaattaggaaaagcaggatatgtaactgacagaggaagacaaaaagttgtccccctaacggacacaacaaatcagaagactgagttacaagcaattcatctagctttgcaggattcgggattagaagtaaacatagtgacagactcacaatatgcattgggaatcattcaagcacaaccagataagagtgaatcagagttagtcagtcaaataatagagcagttaataaaaaaggaaaaagtctacctggcatgggtaccagcacacaaaggaattggaggaaatgaacaagtagataaattggtcagtgctggaatcaggaaagtactatttttagatggaatagataaggcccaagaagaacatgagaaatatcacagtaattggagagcaatggctagtgattttaacctaccacctgtagtagcaaaagaaatagtagccagctgtgataaatgtcagctaaaaggggaagccatgcatggacaagtagactgtagcccaggaatatggcagctagattgtacacatttagaaggaaaagttatcttggtagcagttcatgtagccagtggatatatagaagcagaagtaattccagcagagacagggcaagaaacagcatacttcctcttaaaattagcaggaagatggccagtaaaaacagtacatacagacaatggcagcaatttcaccagtactacagttaaggccgcctgttggtgggcggggatcaagcaggaatttggcattccctacaatccccaaagtcaaggagtaatagaatctatgaataaagaattaaagaaaattataggacaggtaagagatcaggctgaacatcttaagacagcagtacaaatggcagtattcatccacaattttaaaagaaaaggggggattggggggtacagtgcaggggaaagaatagtagacataatagcaacagacatacaaactaaagaattacaaaaacaaattacaaaaattcaaaattttcgggtttattacagggacagcagagatccagtttggaaaggaccagcaaagctcctctggaaaggtgaaggggcagtagtaatacaagataatagtgacataaaagtagtgccaagaagaaaagcaaagatcatcagggattatggaaaacagatggcaggtgatgattgtgtaccgtccatgaagggttcgatgatcggtcgtcgcagcggtctatggcaacggcagattcgttagacaaagaaaaatagacaggttaattgatagactaatagaaagagcagaagacagtggcaatgagagtgaaggagaagtatcagcacttgtggagatgggggtggaaatggggcaccatgctccttgggatattgatgatctgtagtgctacagaaaaattgtgggtcacagtctattatggggtacctgtgtggaaggaagcaaccaccactctattttgtgcatcagatgctaaagcatatgatacagaggtacataatgtttgggccacacatgcctgtgtacccacagaccccaacccacaagaagtagtattggtaaatgtgacagaaaattttaacatgtggaaaaatgacatggtagaacagatgcatgaggatataatcagtttatgggatcaaagcctaaagccatgtgtaaaattaaccccactctgtgttagtttaaagtgcactgatttgaagaatgatactaataccaatagtagtagcgggagaatgataatggagaaaggagagataaaaaactgctctttcaatatcagcacaagcataagagataaggtgcagaaagaatatgcattcttttataaacttgatatagtaccaatagataataccagctataggttgataagttgtaacacctcagtcattacacaggcctgtccaaaggtatcctttgagccaattcccatacattattgtgccccggctggttttgcgattctaaaatgtaataataagacgttcaatggaacaggaccatgtacaaatgtcagcacagtacaatgtacacatggaatcaggccagtagtatcaactcaactgctgttaaatggcagtctagcagaagaagatgtagtaattagatctgccaatttcacagacaatgctaaaaccataatagtacagctgaacacatctgtagaaattaattgtacaagacccaacaacaatacaagaaaaagtatccgtatccagaggggaccagggagagcatttgttacaataggaaaaataggaaatatgagacaagcacattgtaacattagtagagcaaaatggaatgccactttaaaacagatagctagcaaattaagagaacaatttggaaataataaaacaataatctttaagcaatcctcaggaggggacccagaaattgtaacgcacagttttaattgtggaggggaatttttctactgtaattcaacacaactgtttaatagtacttggtttaatagtacttggagtactgaagggtcaaataacactgaaggaagtgacacaatcacactcccatgcagaataaaacaatttataaacatgtggcaggaagtaggaaaagcaatgtatgcccctcccatcagtggacaaattagatgttcatcaaatattactgggctgctattaacaagagatggtggtaataacaacaatgggtccgagatcttcagacctggaggaggcgatatgagggacaattggagaagtgaattatataaatataaagtagtaaaaattgaaccattaggagtagcacccaccaaggcaaagagaagagtggtgcagagagaaaaaagagcagtgggaataggagctttgttccttgggttcttgggagcagcaggaagcactatgggcgcagcgtcaatgacgctgacggtacaggccagacaattattgtctgatatagtgcagcagcagaacaatttgctgagggctattgaggcgcaacagcatctgttgcaactcacagtctggggcatcaaacagctccaggcaagaatcctggctgtggaaagatacctaaaggatcaacagctcctggggatttggggttgctctggaaaactcatttgcaccactgctgtgccttggaatgctagttggagtaataaatctctggaacagatttggaataacatgacctggatggagtgggacagagaaattaacaattacacaagcttaatacactccttaattgaagaatcgcaaaaccagcaagaaaagaatgaacaagaattattggaattagataaatgggcaagtttgtggaattggtttaacataacaaattggctgtggtatataaaattattcataatgatagtaggaggcttggtaggtttaagaatagtttttgctgtactttctatagtgaatagagttaggcagggatattcaccattatcgtttcagacccacctcccaatcccgaggggacccgacaggcccgaaggaatagaagaagaaggtggagagagagacagagacagatccattcgattagtgaacggatccttagcacttatctgggacgatctgcggagcctgtgcctcttcagctaccaccgcttgagagacttactcttgattgtaacgaggattgtggaacttctgggacgcagggggtgggaagccctcaaatattggtggaatctcctacagtattggagtcaggaactaaagaatagtgctgttaacttgctcaatgccacagccatagcagtagctgaggggacagatagggttatagaagtattacaagcagcttatagagctattcgccacatacctagaagaataagacagggcttggaaaggattttgctataagatgggtggcaagtggtcaaaaagtagtgtgattggatggcctgctgtaagggaaagaatgagacgagctgagccagcagcagatggggtgggagcagtatctcgagacctagaaaaacatggagcaatcacaagtagcaatacagcagctaacaatgctgcttgtgcctggctagaagcacaagaggaggaagaggtgggttttccagtcacacctcaggtacctttaagaccaatgacttacaaggcagctgtagatcttagccactttttaaaagaaaaggggggactggaagggctaattcactcccaaagaagacaagatatccttaccgtccatgaagggttcgatcgtaaagtgggatagttttttatggcaacggcagattcgttgagcctgcatggaatggatgaccctgagagagaagtgttagagtggaggtttgacagccgcctagcatttcatcacgtggcccgagagctgcatccggagtacttcaagaactgctgacatcgagcttgctacaagggactttccgctggggactttccagggaggcgtggcctgggcgggactggggagtggcgagccctcagatgctgcatataagcagctgctttttgcctgtactgggtctctctggttagaccagatctgagcctgggagctctctggctaactagggaacccactgcttaagcctcaataaagcttgccttgagtgcttcaagtagtgtgtgcccgtctgttgtgtgactctggtaactagagatccctcagacccttttagtcagtgtggaaaatctctagca

SEQ ID NO: 64 - DNA, 8561 bp, Artificial Sequence
  Synthetic Sequence
tggaagggctaatttggtcccaaaaaagacaagagatccttgatctgtggatctaccacacacaaggctacttccctgattggcagaactacacaccagggccagggatcagatatccactgacctttggatggtgcttcaagttagtaccagttgaaccagagcaagtagaagaggccaatgaaggagagaacaacagcttgttacaccctatgagccagcatgggatggaggacccggagggagaagtattagtgtggaagtttgacagcctcctagcatttcgtcacatggcccgagagctgcatccggagtactacaaagactgctgacatcgagctttctacaagggactttccgctggggactttccagggaggtgtggcctgggcgggactggggagtggcgagccctcagatgctacatataagcagctgctttttgcctgtactgggtctctctggttagaccagatctgagcctgggagctctctggctaactagggaacccactgcttaagcctcaataaagcttgccttgagtgctcaaagtagtgtgtgcccgtctgttgtgtgactctggtaactagagatccctcagacccttttagtcagtgtggaaaatctctagcagtggcgcccgaacagggacttgaaagcgaaagtaaagccagaggagatctctcgacgcaggactcggcttgctgaagcgcgcacggcaagaggcgaggggcggcgactggtgagtacgccaaaaattttgactagcggaggctagaaggagagagatgggtgcgagagcgtcggtattaagcgggggagaattagataaatgggaaaaaattcggttaaggccagggggaaagaaacaatataaactaaaacatatagtatgggcaagcagggagctagaacgattcgcagttaatcctggccttttagagacatcagaaggctgtagacaaatactgggacagctacaaccatcccttcagacaggatcagaagaacttagatcattatataatacaatagcagtcctctattgtgtgcatcaaaggatagatgtaaaagacaccaaggaagccttagataagatagaggaagagcaaaacaaaagtaagaaaaaggcacagcaagcagcagctgacacaggaaacaacagccaggtcagccaaaattaccctatagtgcagaacctccaggggcaaatggtacatcaggccatatcacctagaactttaaatgcatgggtaaaagtagtagaagagaaggctttcagcccagaagtaatacccatgttttcagcattatcagaaggagccaccccacaagatttaaataccatgctaaacacagtggggggacatcaagcagccatgcaaatgttaaaagagaccatcaatgaggaagctgcagaatgggatagattgcatccagtgcatgcagggcctattgcaccaggccagatgagagaaccaaggggaagtgacatagcaggaactactagtacccttcaggaacaaataggatggatgacacataatccacctatcccagtaggagaaatctataaaagatggataatcctgggattaaataaaatagtaagaatgtatagccctaccagcattctggacataagacaaggaccaaaggaaccctttagagactatgtagaccgattctataaaactctaagagccgagcaagcttcacaagaggtaaaaaattggatgacagaaaccttgttggtccaaaatgcgaacccagattgtaagactattttaaaagcattgggaccaggagcgacactagaagaaatgatgacagcatgtcagggagtggggggacccggccataaagcaagagttttggctgaagcaatgagccaagtaacaaatccagctaccataatgatacagaaaggcaattttaggaaccaaagaaagactgttaagtgtttcaattgtggcaaagaagggcacatagccaaaaattgcagggcccctaggaaaaagggctgttggaaatgtggaaaggaaggacaccaaatgaaagattgtactgagagacaggctaattttttagggaagatctggccttcccacaagggaaggccagggaattttcttcagagcagaccagagccaacagccccaccagaagagagcttcaggtttggggaagagacaacaactccctctcagaagcaggagccgatagacaaggaactgtatcctttagcttccctcagatcactctttggcagcgacccctcgtcacaataaagataggggggcaattaaaggaagctctattagatacaggagcagatgatacagtattagaagaaatgaatttgccaggaagatggaaaccaaaaatgatagggggaattggaggttttatcaaagtaagacagtatgatcagatactcatagaaatctgcggacataaagctataggtacagtattagtaggacctacacctgtcaacataattggaagaaatctgttgactcagattggctgcactttaaattttcccattagtcctattgagactgtaccagtaaaattaaagccaggaatggatggcccaaaagttaaacaatggccattgacagaagaaaaaataaaagcattagtagaaatttgtacagaaatggaaaaggaaggaaaaatttcaaaaattgggcctgaaaatccatacaatactccagtatttgccataaagaaaaaagacagtactaaatggagaaaattagtagatttcagagaacttaataagagaactcaagatttctgggaagttcaattaggaataccacatcctgcagggttaaaacagaaaaaatcagtaacagtactggatgtgggcgatgcatatttttcagttcccttagataaagacttcaggaagtatactgcatttaccatacctagtataaacaatgagacaccagggattagatatcagtacaatgtgcttccacagggatggaaaggatcaccagcaatattccagtgtagcatgacaaaaatcttagagccttttagaaaacaaaatccagacatagtcatctatcaatacatggatgatttgtatgtaggatctgacttagaaatagggcagcatagaacaaaaatagaggaactgagacaacatctgttgaggtggggatttaccacaccagacaaaaaacatcagaaagaacctccattcctttggatgggttatgaactccatcctgataaatggacagtacagcctatagtgctgccagaaaaggacagctggactgtcaatgacatacagaaattagtgggaaaattgaattgggcaagtcagatttatgcagggattaaagtaaggcaattatgtaaacttcttaggggaaccaaagcactaacagaagtagtaccactaacagaagaagcagagctagaactggcagaaaacagggagattctaaaagaaccggtacatggagtgtattatgacccatcaaaagacttaatagcagaaatacagaagcaggggcaaggccaatggacatatcaaatttatcaagagccatttaaaaatctgaaaacaggaaagtatgcaagaatgaagggtgcccacactaatgatgtgaaacaattaacagaggcagtacaaaaaatagccacagaaagcatagtaatatggggaaagactcctaaatttaaattacccatacaaaaggaaacatgggaagcatggtggacagagtattggcaagccacctggattcctgagtgggagtttgtcaatacccctcccttagtgaagttatggtaccagttagagaaagaacccataataggagcagaaactttctatgtagatggggcagccaatagggaaactaaattaggaaaagcaggatatgtaactgacagaggaagacaaaaagttgtccccctaacggacacaacaaatcagaagactgagttacaagcaattcatctagctttgcaggattcgggattagaagtaaacatagtgacagactcacaatatgcattgggaatcattcaagcacaaccagataagagtgaatcagagttagtcagtcaaataatagagcagttaataaaaaaggaaaaagtctacctggcatgggtaccagcacacaaaggaattggaggaaatgaacaagtagataaattggtcagtgctggaatcaggaaagtactatttttagatggaatagataaggcccaagaagaacatgagaaatatcacagtaattggagagcaatggctagtgattttaacctaccacctgtagtagcaaaagaaatagtagccagctgtgataaatgtcagctaaaaggggaagccatgcatggacaagtagactgtagcccaggaatatggcagctagattgtacacatttagaaggaaaagttatcttggtagcagttcatgtagccagtggatatatagaagcagaagtaattccagcagagacagggcaagaaacagcatacttcctcttaaaattagcaggaagatggccagtaaaaacagtacatacagacaatggcagcaatttcaccagtactacagttaaggccgcctgttggtgggcggggatcaagcaggaatttggcattccctacaatccccaaagtcaaggagtaatagaatctatgaataaagaattaaagaaaattataggacaggtaagagatcaggctgaacatcttaagacagcagtacaaatggcagtattcatccacaattttaaaagaaaaggggggattggggggtacagtgcaggggaaagaatagtagacataatagcaacagacatacaaactaaagaattacaaaaacaaattacaaaaattcaaaattttcgggtttattacagggacagcagagatccagtttggaaaggaccagcaaagctcctctggaaaggtgaaggggcagtagtaatacaagataatagtgacataaaagtagtgccaagaagaaaagcaaagatcatcagggattaaccgtccatgaagggttcgattatctgtagccaacattcgatatggcaacggcagattcgttggagatgggggtggaaatggggcaccatgctccttgggatattgatgatctgtagtgctacagaaaaattgtgggtcacagtctattatggggtacctgtgtggaaggaagcaaccaccactctattttgtgcatcagatgctaaagcatatgatacagaggtacataatgtttgggccacacatgcctgtgtacccacagaccccaacccacaagaagtagtattggtaaatgtgacagaaaattttaacatgtggaaaaatgacatggtagaacagatgcatgaggatataatcagtttatgggatcaaagcctaaagccatgtgtaaaattaaccccactctgtgttagtttaaagtgcactgatttgaagaatgatactaataccaatagtagtagcgggagaatgataatggagaaaggagagataaaaaactgctctttcaatatcagcacaagcataagagataaggtgcagaaagaatatgcattcttttataaacttgatatagtaccaatagataataccagctataggttgataagttgtaacacctcagtcattacacaggcctgtccaaaggtatcctttgagccaattcccatacattattgtgccccggctggttttgcgattctaaaatgtaataataagacgttcaatggaacaggaccatgtacaaatgtcagcacagtacaatgtacacatggaatcaggccagtagtatcaactcaactgctgttaaatggcagtctagcagaagaagatgtagtaattagatctgccaatttcacagacaatgctaaaaccataatagtacagctgaacacatctgtagaaattaattgtacaagacccaacaacaatacaagaaaaagtatccgtatccagaggggaccagggagagcatttgttacaataggaaaaataggaaatatgagacaagcacattgtaacattagtagagcaaaatggaatgccactttaaaacagatagctagcaaattaagagaacaatttggaaataataaaacaataatctttaagcaatcctcaggaggggacccagaaattgtaacgcacagttttaattgtggaggggaatttttctactgtaattcaacacaactgtttaatagtacttggtttaatagtacttggagtactgaagggtcaaataacactgaaggaagtgacacaatcacactcccatgcagaataaaacaatttataaacatgtggcaggaagtaggaaaagcaatgtatgcccctcccatcagtggacaaattagatgttcatcaaatattactgggctgctattaacaagagatggtggtaataacaacaatgggtccgagatcttcagacctggaggaggcgatatgagggacaattggagaagtgaattatataaatataaagtagtaaaaattgaaccattaggagtagcacccaccaaggcaaagagaagagtggtgcagagagaaaaaagagcagtgggaataggagctttgttccttgggttcttgggagcagcaggaagcactatgggcgcagcgtcaatgacgctgacggtacaggccagacaattattgtctgatatagtgcagcagcagaacaatttgctgagggctattgaggcgcaacagcatctgttgcaactcacagtctggggcatcaaacagctccaggcaagaatcctggctgtggaaagatacctaaaggatcaacagctcctggggatttggggttgctctggaaaactcatttgcaccactgctgtgccttggaatgctagttggagtaataaatctctggaacagatttggaataacatgacctggatggagtgggacagagaaattaacaattacacaagcttaatacactccttaattgaagaatcgcaaaaccagcaagaaaagaatgaacaagaattattggaattagataaatgggcaagtttgtggaattggtttaacataacaaattggctgtggtatataaaattattcataatgatagtaggaggcttggtaggtttaagaatagtttttgctgtactttctatagtgaatagagttaggcagggatattcaccattatcgtttcagacccacctcccaatcccgaggggacccgacaggcccgaaggaatagaagaagaaggtggagagagagacagagacagatccattcgattagtgaacggatccttagcacttatctgggacgatctgcggagcctgtgcctcttcagctaccaccgcttgagagacttactcttgattgtaacgaggattgtggaacttctgggacgcagggggtgggaagccctcaaatattggtggaatctcctacagtattggagtcaggaactaaagaatagtgctgttaacttgctcaatgccacagccatagcagtagctgaggggacagatagggttatagaagtattacaagcagcttatagagctattcgccacatacctagaagaataagacagggcttggaaaggattttgctataagatgggtggcaagtggtcaaaaagtagtgtgattggatggcctgctgtaagggaaagaatgagacgagctgagccagcagcagatggggtgggagcagtatctcgagacctagaaaaacatggagcaatcacaagtagcaatacagcagctaacaatgctgcttgtgcctggctagaagcacaagaggaggaagaggtgggttttccagtcacacctcaggtacctttaagaccaatgacttacaaggcagctgtagatcttagccactttttaaaagaaaaggggggactggaagggctaattcactcccaaagaagacaagatatccttgatctgtggatctaccacacacaaggctacttccctgattggcagaactacacaccagggccaggggtcagatatccactgacctttggatggtgctacaagctagtaccagttgagccagataaggtagaagaggccaataaaggagagaacaccagcttgttacaccctgtgagcctgcatggaatggatgaccctgagagagaagtgttagagtggaggtttgacagccgcctagcatttcatcacgtggcccgagagctgcatccggagtacttcaagaactgctgacatcgagcttgctacaagggactttccgctggggactttccagggaggcgtggcctgggcgggactggggagtggcgagccctcagatgctgcatataagcagctgctttttgcctgtactgggtctctctggttagaccagatctgagcctgggagctctctggctaactagggaacccactgcttaagcctcaataaagcttgccttgagtgcttcaagtagtgtgtgcccgtctgttgtgtgactctggtaactagagatccctcagacccttttagtcagtgtggaaaatctctagca

SEQ ID NO: 65 - DNA, 8450 bp, Artificial Sequence
  Synthetic Sequence
tggaagggctaatttggtcccaaaaaagacaagagatccttgatctgtggatctaccacacacaaggctacttccctgattggcagaactacacaccagggccagggatcagatatccactgacctttggatggtgcttcaagttagtaccagttgaaccagagcaagtagaagaggccaatgaaggagagaacaacagcttgttacaccctatgagccagcatgggatggaggacccggagggagaagtattagtgtggaagtttgacagcctcctagcatttcgtcacatggcccgagagctgcatccggagtactacaaagactgctgacatcgagctttctacaagggactttccgctggggactttccagggaggtgtggcctgggcgggactggggagtggcgagccctcagatgctacatataagcagctgctttttgcctgtactgggtctctctggttagaccagatctgagcctgggagctctctggctaactagggaacccactgcttaagcctcaataaagcttgccttgagtgctcaaagtagtgtgtgcccgtctgttgtgtgactctggtaactagagatccctcagacccttttagtcagtgtggaaaatctctagcagtggcgcccgaacagggacttgaaagcgaaagtaaagccagaggagatctctcgacgcaggactcggcttgctgaagcgcgcacggcaagaggcgaggggcggcgactggtgagtacgccaaaaattttgactagcggaggctagaaggagagagatgggtgcgagagcgtcggtattaagcgggggagaattagataaatgggaaaaaattcggttaaggccagggggaaagaaacaatataaactaaaacatatagtatgggcaagcagggagctagaacgattcgcagttaatcctggccttttagagacatcagaaggctgtagacaaatactgggacagctacaaccatcccttcagacaggatcagaagaacttagatcattatataatacaatagcagtcctctattgtgtgcatcaaaggatagatgtaaaagacaccaaggaagccttagataagatagaggaagagcaaaacaaaagtaagaaaaaggcacagcaagcagcagctgacacaggaaacaacagccaggtcagccaaaattaccctatagtgcagaacctccaggggcaaatggtacatcaggccatatcacctagaactttaaatgcatgggtaaaagtagtagaagagaaggctttcagcccagaagtaatacccatgttttcagcattatcagaaggagccaccccacaagatttaaataccatgctaaacacagtggggggacatcaagcagccatgcaaatgttaaaagagaccatcaatgaggaagctgcagaatgggatagattgcatccagtgcatgcagggcctattgcaccaggccagatgagagaaccaaggggaagtgacatagcaggaactactagtacccttcaggaacaaataggatggatgacacataatccacctatcccagtaggagaaatctataaaagatggataatcctgggattaaataaaatagtaagaatgtatagccctaccagcattctggacataagacaaggaccaaaggaaccctttagagactatgtagaccgattctataaaactctaagagccgagcaagcttcacaagaggtaaaaaattggatgacagaaaccttgttggtccaaaatgcgaacccagattgtaagactattttaaaagcattgggaccaggagcgacactagaagaaatgatgacagcatgtcagggagtggggggacccggccataaagcaagagttttggctgaagcaatgagccaagtaacaaatccagctaccataatgatacagaaaggcaattttaggaaccaaagaaagactgttaagtgtttcaattgtggcaaagaagggcacatagccaaaaattgcagggcccctaggaaaaagggctgttggaaatgtggaaaggaaggacaccaaatgaaagattgtactgagagacaggctaattttttagggaagatctggccttcccacaagggaaggccagggaattttcttcagagcagaccagagccaacagccccaccagaagagagcttcaggtttggggaagagacaacaactccctctcagaagcaggagccgatagacaaggaactgtatcctttagcttccctcagatcactctttggcagcgacccctcgtcacaataaagataggggggcaattaaaggaagctctattagatacaggagcagatgatacagtattagaagaaatgaatttgccaggaagatggaaaccaaaaatgatagggggaattggaggttttatcaaagtaagacagtatgatcagatactcatagaaatctgcggacataaagctataggtacagtattagtaggacctacacctgtcaacataattggaagaaatctgttgactcagattggctgcactttaaattttcccattagtcctattgagactgtaccagtaaaattaaagccaggaatggatggcccaaaagttaaacaatggccattgacagaagaaaaaataaaagcattagtagaaatttgtacagaaatggaaaaggaaggaaaaatttcaaaaattgggcctgaaaatccatacaatactccagtatttgccataaagaaaaaagacagtactaaatggagaaaattagtagatttcagagaacttaataagagaactcaagatttctgggaagttcaattaggaataccacatcctgcagggttaaaacagaaaaaatcagtaacagtactggatgtgggcgatgcatatttttcagttcccttagataaagacttcaggaagtatactgcatttaccatacctagtataaacaatgagacaccagggattagatatcagtacaatgtgcttccacagggatggaaaggatcaccagcaatattccagtgtagcatgacaaaaatcttagagccttttagaaaacaaaatccagacatagtcatctatcaatacatggatgatttgtatgtaggatctgacttagaaatagggcagcatagaacaaaaatagaggaactgagacaacatctgttgaggtggggatttaccacaccagacaaaaaacatcagaaagaacctccattcctttggatgggttatgaactccatcctgataaatggacagtacagcctatagtgctgccagaaaaggacagctggactgtcaatgacatacagaaattagtgggaaaattgaattgggcaagtcagatttatgcagggattaaagtaaggcaattatgtaaacttcttaggggaaccaaagcactaacagaagtagtaccactaacagaagaagcagagctagaactggcagaaaacagggagattctaaaagaaccggtacatggagtgtattatgacccatcaaaagacttaatagcagaaatacagaagcaggggcaaggccaatggacatatcaaatttatcaagagccatttaaaaatctgaaaacaggaaagtatgcaagaatgaagggtgcccacactaatgatgtgaaacaattaacagaggcagtacaaaaaatagccacagaaagcatagtaatatggggaaagactcctaaatttaaattacccatacaaaaggaaacatgggaagcatggtggacagagtattggcaagccacctggattcctgagtgggagtttgtcaatacccctcccttagtgaagttatggtaccagttagagaaagaacccataataggagcagaaactttctatgtagatggggcagccaatagggaaactaaattaggaaaagcaggatatgtaactgacagaggaagacaaaaagttgtccccctaacggacacaacaaatcagaagactgagttacaagcaattcatctagctttgcaggattcgggattagaagtaaacatagtgacagactcacaatatgcattgggaatcattcaagcacaaccagataagagtgaatcagagttagtcagtcaaataatagagcagttaataaaaaaggaaaaagtctacctggcatgggtaccagcacacaaaggaattggaggaaatgaacaagtagataaattggtcagtgctggaatcaggaaagtactatttttagatggaatagataaggcccaagaagaacatgagaaatatcacagtaattggagagcaatggctagtgattttaacctaccacctgtagtagcaaaagaaatagtagccagctgtgataaatgtcagctaaaaggggaagccatgcatggacaagtagactgtagcccaggaatatggcagctagattgtacacatttagaaggaaaagttatcttggtagcagttcatgtagccagtggatatatagaagcagaagtaattccagcagagacagggcaagaaacagcatacttcctcttaaaattagcaggaagatggccagtaaaaacagtacatacagacaatggcagcaatttcaccagtactacagttaaggccgcctgttggtgggcggggatcaagcaggaatttggcattccctacaatccccaaagtcaaggagtaatagaatctatgaataaagaattaaagaaaattataggacaggtaagagatcaggctgaacatcttaagacagcagtacaaatggcagtattcatccacaattttaaaagaaaaggggggattggggggtacagtgcaggggaaagaatagtagacataatagcaacagacatacaaactaaagaattacaaaaacaaattacaaaaattcaaaattttcgggtttattacagggacagcagagatccagtttggaaaggaccagcaaagctcctctggaaaggtgaaggggcagtagtaatacaagataatagtgacataaaagtagtgccaagaagaaaagcaaagatcatcagggattaaccgtccatgaagggttcgattatctgtagccaacattcgatatggcaacggcagattcgttggagatgggggtggaaatggggcaccatgctccttgggatattgatgatctgtagtgctacagaaaaattgtgggtcacagtctattatggggtacctgtgtggaaggaagcaaccaccactctattttgtgcatcagatgctaaagcatatgatacagaggtacataatgtttgggccacacatgcctgtgtacccacagaccccaacccacaagaagtagtattggtaaatgtgacagaaaattttaacatgtggaaaaatgacatggtagaacagatgcatgaggatataatcagtttatgggatcaaagcctaaagccatgtgtaaaattaaccccactctgtgttagtttaaagtgcactgatttgaagaatgatactaataccaatagtagtagcgggagaatgataatggagaaaggagagataaaaaactgctctttcaatatcagcacaagcataagagataaggtgcagaaagaatatgcattcttttataaacttgatatagtaccaatagataataccagctataggttgataagttgtaacacctcagtcattacacaggcctgtccaaaggtatcctttgagccaattcccatacattattgtgccccggctggttttgcgattctaaaatgtaataataagacgttcaatggaacaggaccatgtacaaatgtcagcacagtacaatgtacacatggaatcaggccagtagtatcaactcaactgctgttaaatggcagtctagcagaagaagatgtagtaattagatctgccaatttcacagacaatgctaaaaccataatagtacagctgaacacatctgtagaaattaattgtacaagacccaacaacaatacaagaaaaagtatccgtatccagaggggaccagggagagcatttgttacaataggaaaaataggaaatatgagacaagcacattgtaacattagtagagcaaaatggaatgccactttaaaacagatagctagcaaattaagagaacaatttggaaataataaaacaataatctttaagcaatcctcaggaggggacccagaaattgtaacgcacagttttaattgtggaggggaatttttctactgtaattcaacacaactgtttaatagtacttggtttaatagtacttggagtactgaagggtcaaataacactgaaggaagtgacacaatcacactcccatgcagaataaaacaatttataaacatgtggcaggaagtaggaaaagcaatgtatgcccctcccatcagtggacaaattagatgttcatcaaatattactgggctgctattaacaagagatggtggtaataacaacaatgggtccgagatcttcagacctggaggaggcgatatgagggacaattggagaagtgaattatataaatataaagtagtaaaaattgaaccattaggagtagcacccaccaaggcaaagagaagagtggtgcagagagaaaaaagagcagtgggaataggagctttgttccttgggttcttgggagcagcaggaagcactatgggcgcagcgtcaatgacgctgacggtacaggccagacaattattgtctgatatagtgcagcagcagaacaatttgctgagggctattgaggcgcaacagcatctgttgcaactcacagtctggggcatcaaacagctccaggcaagaatcctggctgtggaaagatacctaaaggatcaacagctcctggggatttggggttgctctggaaaactcatttgcaccactgctgtgccttggaatgctagttggagtaataaatctctggaacagatttggaataacatgacctggatggagtgggacagagaaattaacaattacacaagcttaatacactccttaattgaagaatcgcaaaaccagcaagaaaagaatgaacaagaattattggaattagataaatgggcaagtttgtggaattggtttaacataacaaattggctgtggtatataaaattattcataatgatagtaggaggcttggtaggtttaagaatagtttttgctgtactttctatagtgaatagagttaggcagggatattcaccattatcgtttcagacccacctcccaatcccgaggggacccgacaggcccgaaggaatagaagaagaaggtggagagagagacagagacagatccattcgattagtgaacggatccttagcacttatctgggacgatctgcggagcctgtgcctcttcagctaccaccgcttgagagacttactcttgattgtaacgaggattgtggaacttctgggacgcagggggtgggaagccctcaaatattggtggaatctcctacagtattggagtcaggaactaaagaatagtgctgttaacttgctcaatgccacagccatagcagtagctgaggggacagatagggttatagaagtattacaagcagcttatagagctattcgccacatacctagaagaataagacagggcttggaaaggattttgctataagatgggtggcaagtggtcaaaaagtagtgtgattggatggcctgctgtaagggaaagaatgagacgagctgagccagcagcagatggggtgggagcagtatctcgagacctagaaaaacatggagcaatcacaagtagcaatacagcagctaacaatgctgcttgtgcctggctagaagcacaagaggaggaagaggtgggttttccagtcacacctcaggtacctttaagaccaatgacttacaaggcagctgtagatcttagccactttttaaaagaaaaggggggactggaagggctaattcactcccaaagaagacaagatatccttaccgtccatgaagggttcgatcgtaaagtgggatagttttttatggcaacggcagattcgttgagcctgcatggaatggatgaccctgagagagaagtgttagagtggaggtttgacagccgcctagcatttcatcacgtggcccgagagctgcatccggagtacttcaagaactgctgacatcgagcttgctacaagggactttccgctggggactttccagggaggcgtggcctgggcgggactggggagtggcgagccctcagatgctgcatataagcagctgctttttgcctgtactgggtctctctggttagaccagatctgagcctgggagctctctggctaactagggaacccactgcttaagcctcaataaagcttgccttgagtgcttcaagtagtgtgtgcccgtctgttgtgtgactctggtaactagagatccctcagacccttttagtcagtgtggaaaatctctagca

SEQ ID NO: 66 - DNA, 8785 bp, Artificial Sequence
  Synthetic Sequence
tggaagggctaatttggtcccaaaaaagacaagagatccttgatctgtggatctaccacacacaaggctacttccctgattggcagaactacacaccagggccagggatcagatatccactgacctttggatggtgcttcaagttagtaccagttgaaccagagcaagtagaagaggccaatgaaggagagaacaacagcttgttacaccctatgagccagcatgggatggaggacccggagggagaagtattagtgtggaagtttgacagcctcctagcatttcgtcacatggcccgagagctgcatccggagtactacaaagactgctgacatcgagctttctacaagggactttccgctggggactttccagggaggtgtggcctgggcgggactggggagtggcgagccctcagatgctacatataagcagctgctttttgcctgtactgggtctctctggttagaccagatctgagcctgggagctctctggctaactagggaacccactgcttaagcctcaataaagcttgccttgagtgctcaaagtagtgtgtgcccgtctgttgtgtgactctggtaactagagatccctcagacccttttagtcagtgtggaaaatctctagcagtggcgcccgaacagggacttgaaagcgaaagtaaagccagaggagatctctcgacgcaggactcggcttgctgaagcgcgcacggcaagaggcgaggggcggcgactggtgagtacgccaaaaattttgactagcggaggctagaaggagagagatgggtgcgagagcgtcggtattaagcgggggagaattagataaatgggaaaaaattcggttaaggccagggggaaagaaacaatataaactaaaacatatagtatgggcaagcagggagctagaacgattcgcagttaatcctggccttttagagacatcagaaggctgtagacaaatactgggacagctacaaccatcccttcagacaggatcagaagaacttagatcattatataatacaatagcagtcctctattgtgtgcatcaaaggatagatgtaaaagacaccaaggaagccttagataagatagaggaagagcaaaacaaaagtaagaaaaaggcacagcaagcagcagctgacacaggaaacaacagccaggtcagccaaaattaccctatagtgcagaacctccaggggcaaatggtacatcaggccatatcacctagaactttaaatgcatgggtaaaagtagtagaagagaaggctttcagcccagaagtaatacccatgttttcagcattatcagaaggagccaccccacaagatttaaataccatgctaaacacagtggggggacatcaagcagccatgcaaatgttaaaagagaccatcaatgaggaagctgcagaatgggatagattgcatccagtgcatgcagggcctattgcaccaggccagatgagagaaccaaggggaagtgacatagcaggaactactagtacccttcaggaacaaataggatggatgacacataatccacctatcccagtaggagaaatctataaaagatggataatcctgggattaaataaaatagtaagaatgtatagccctaccagcattctggacataagacaaggaccaaaggaaccctttagagactatgtagaccgattctataaaactctaagagccgagcaagcttcacaagaggtaaaaaattggatgacagaaaccttgttggtccaaaatgcgaacccagattgtaagactattttaaaagcattgggaccaggagcgacactagaagaaatgatgacagcatgtcagggagtggggggacccggccataaagcaagagttttggctgaagcaatgagccaagtaacaaatccagctaccataatgatacagaaaggcaattttaggaaccaaagaaagactgttaagtgtttcaattgtggcaaagaagggcacatagccaaaaattgcagggcccctaggaaaaagggctgttggaaatgtggaaaggaaggacaccaaatgaaagattgtactgagagacaggctaattttttagggaagatctggccttcccacaagggaaggccagggaattttcttcagagcagaccagagccaacagccccaccagaagagagcttcaggtttggggaagagacaacaactccctctcagaagcaggagccgatagacaaggaactgtatcctttagcttccctcagatcactctttggcagcgacccctcgtcacaataaagataggggggcaattaaaggaagctctattagatacaggagcagatgatacagtattagaagaaatgaatttgccaggaagatggaaaccaaaaatgatagggggaattggaggttttatcaaagtaagacagtatgatcagatactcatagaaatctgcggacataaagctataggtacagtattagtaggacctacacctgtcaacataattggaagaaatctgttgactcagattggctgcactttaaattttcccattagtcctattgagactgtaccagtaaaattaaagccaggaatggatggcccaaaagttaaacaatggccattgacagaagaaaaaataaaagcattagtagaaatttgtacagaaatggaaaaggaaggaaaaatttcaaaaattgggcctgaaaatccatacaatactccagtatttgccataaagaaaaaagacagtactaaatggagaaaattagtagatttcagagaacttaataagagaactcaagatttctgggaagttcaattaggaataccacatcctgcagggttaaaacagaaaaaatcagtaacagtactggatgtgggcgatgcatatttttcagttcccttagataaagacttcaggaagtatactgcatttaccatacctagtataaacaatgagacaccagggattagatatcagtacaatgtgcttccacagggatggaaaggatcaccagcaatattccagtgtagcatgacaaaaatcttagagccttttagaaaacaaaatccagacatagtcatctatcaatacatggatgatttgtatgtaggatctgacttagaaatagggcagcatagaacaaaaatagaggaactgagacaacatctgttgaggtggggatttaccacaccagacaaaaaacatcagaaagaacctccattcctttggatgggttatgaactccatcctgataaatggacagtacagcctatagtgctgccagaaaaggacagctggactgtcaatgacatacagaaattagtgggaaaattgaattgggcaagtcagatttatgcagggattaaagtaaggcaattatgtaaacttcttaggggaaccaaagcactaacagaagtagtaccactaacagaagaagcagagctagaactggcagaaaacagggagattctaaaagaaccggtacatggagtgtattatgacccatcaaaagacttaatagcagaaatacagaagcaggggcaaggccaatggacatatcaaatttatcaagagccatttaaaaatctgaaaacaggaaagtatgcaagaatgaacgaatctgccgttgccatatacagcatctgaacaagctgatcgaacccttcatggacggttaaggccgcctgttggtgggcggggatcaagcaggaatttggcattccctacaatccccaaagtcaaggagtaatagaatctatgaataaagaattaaagaaaattataggacaggtaagagatcaggctgaacatcttaagacagcagtacaaatggcagtattcatccacaattttaaaagaaaaggggggattggggggtacagtgcaggggaaagaatagtagacataatagcaacagacatacaaactaaagaattacaaaaacaaattacaaaaattcaaaattttcgggtttattacagggacagcagagatccagtttggaaaggaccagcaaagctcctctggaaaggtgaaggggcagtagtaatacaagataatagtgacataaaagtagtgccaagaagaaaagcaaagatcatcagggattatggaaaacagatggcaggtgatgattgtgtggcaagtagacaggatgaggattaacacatggaaaagattagtaaaacaccatatgtatatttcaaggaaagctaaggactggttttatagacatcactatgaaagtactaatccaaaaataagttcagaagtacacatcccactaggggatgctaaattagtaataacaacatattggggtctgcatacaggagaaagagactggcatttgggtcagggagtctccatagaatggaggaaaaagagatatagcacacaagtagaccctgacctagcagaccaactaattcatctgcactattttgattgtttttcagaatctgctataagaaataccatattaggacgtatagttagtcctaggtgtgaatatcaagcaggacataacaaggtaggatctctacagtacttggcactagcagcattaataaaaccaaaacagataaagccacctttgcctagtgttaggaaactgacagaggacagatggaacaagccccagaagaccaagggccacagagggagccatacaatgaatggacactagagcttttagaggaacttaagagtgaagctgttagacattttcctaggatatggctccataacttaggacaacatatctatgaaacttacggggatacttgggcaggagtggaagccataataagaattctgcaacaactgctgtttatccatttcagaattgggtgtcgacatagcagaataggcgttactcgacagaggagagcaagaaatggagccagtagatcctagactagagccctggaagcatccaggaagtcagcctaaaactgcttgtaccaattgctattgtaaaaagtgttgctttcattgccaagtttgtttcatgacaaaagccttaggcatctcctatggcaggaagaagcggagacagcgacgaagagctcatcagaacagtcagactcatcaagcttctctatcaaagcagtaagtagtacatgtaatgcaacctataatagtagcaatagtagcattagtagtagcaataataatagcaatagttgtgtggtccatagtaatcatagaatataggaaaatattaagacaaagaaaaatagacaggttaattgatagactaatagaaagagcagaagacagtggcaatgagagtgaaggagaagtatcagcacttgtggagatgggggtggaaatggggcaccatgctccttgggatattgatgatctgtagtgctacagaaaaattgtgggtcacagtctattatggggtacctgtgtggaaggaagcaaccaccactctattttgtgcatcagatgctaaagcatatgatacagaggtacataatgtttgggccacacatgcctgtgtacccacagaccccaacccacaagaagtagtattggtaaatgtgacagaaaattttaacatgtggaaaaatgacatggtagaacagatgcatgaggatataatcagtttatgggatcaaagcctaaagccatgtgtaaaattaaccccactctgtgttagtttaaagtgcactgatttgaagaatgatactaataccaatagtagtagcgggagaatgataatggagaaaggagagataaaaaactgctctttcaatatcagcacaagcataagagataaggtgcagaaagaatatgcattcttttataaacttgatatagtaccaatagataataccagctataggttgataagttgtaacacctcagtcattacacaggcctgtccaaaggtatcctttgagccaattcccatacattattgtgccccggctggttttgcgattctaaaatgtaataataagacgttcaatggaacaggaccatgtacaaatgtcagcacagtacaatgtacacatggaatcaggccagtagtatcaactcaactgctgttaaatggcagtctagcagaagaagatgtagtaattagatctgccaatttcacagacaatgctaaaaccataatagtacagctgaacacatctgtagaaattaattgtacaagacccaacaacaatacaagaaaaagtatccgtatccagaggggaccagggagagcatttgttacaataggaaaaataggaaatatgagacaagcacattgtaacattagtagagcaaaatggaatgccactttaaaacagatagctagcaaattaagagaacaatttggaaataataaaacaataatctttaagcaatcctcaggaggggacccagaaattgtaacgcacagttttaattgtggaggggaatttttctactgtaattcaacacaactgtttaatagtacttggtttaatagtacttggagtactgaagggtcaaataacactgaaggaagtgacacaatcacactcccatgcagaataaaacaatttataaacatgtggcaggaagtaggaaaagcaatgtatgcccctcccatcagtggacaaattagatgttcatcaaatattactgggctgctattaacaagagatggtggtaataacaacaatgggtccgagatcttcagacctggaggaggcgatatgagggacaattggagaagtgaattatataaatataaagtagtaaaaattgaaccattaggagtagcacccaccaaggcaaagagaagagtggtgcagagagaaaaaagagcagtgggaataggagctttgttccttgggttcttgggagcagcaggaagcactatgggcgcagcgtcaatgacgctgacggtacaggccagacaattattgtctgatatagtgcagcagcagaacaatttgctgagggctattgaggcgcaacagcatctgttgcaactcacagtctggggcatcaaacagctccaggcaagaatcctggctgtggaaagatacctaaaggatcaacagctcctggggatttggggttgctctggaaaactcatttgcaccactgctgtgccttggaatgctagttggagtaataaatctctggaacagatttggaataacatgacctggatggagtgggacagagaaattaacaattacacaagcttaatacactccttaattgaagaatcgcaaaaccagcaagaaaagaatgaacaagaattattggaattagataaatgggcaagtttgtggaattggtttaacataacaaattggctgtggtatataaaattattcataatgatagtaggaggcttggtaggtttaagaatagtttttgctgtactttctatagtgaatagagttaggcagggatattcaccattatcgtttcagacccacctcccaatcccgaggggacccgacaggcccgaaggaatagaagaagaaggtggagagagagacagagacagatccattcgattagtgaacggatccttagcacttatctgggacgatctgcggagcctgtgcctcttcagctaccaccgcttgagagacttactcttgattgtaacgaggattgtggaacttctgggacgcagggggtgggaagccctcaaatattggtggaatctcctacagtattggagtcaggaactaaagaatagtgctgttaacttgctcaatgccacagccatagcagtagctgaggggacagatagggttatagaagtattacaagcagcttatagagctattcgccacatacctagaagaataagacagggcttggaaaggattttgctataagatgggtggcaagtggtcaaaaagtagtgtgattggatggcctgctgtaagggaaagaatgagacgagctgagccagcagcagatggggtgggagcagtatctcgagacctagaaaaacatggagcaatcacaagtagcaatacagcagctaacaatgctgcttgtgcctggctagaagcacaagaggaggaagaggtgggttttccagtcacacctcaggtacctttaagaccaatgacttacaaggcagctgtagatcttagccactttttaaaagaaaaggggggactggaagggctaattcactcccaaagaagacaagatatccttgatctgtggatctaccacacacaaggctacttccctgattggcagaactacacaccagggccaggggtcagatatccactgacctttggatggtgctacaagctagtaccagttgagccagataaggtagaagaggccaataaaggagagaacaccagcttgttacaccctgtgagcctgcatggaatggatgaccctgagagagaagtgttagagtggaggtttgacagccgcctagcatttcatcacgtggcccgagagctgcatccggagtacttcaagaactgctgacatcgagcttgctacaagggactttccgctggggactttccagggaggcgtggcctgggcgggactggggagtggcgagccctcagatgctgcatataagcagctgctttttgcctgtactgggtctctctggttagaccagatctgagcctgggagctctctggctaactagggaacccactgcttaagcctcaataaagcttgccttgagtgcttcaagtagtgtgtgcccgtctgttgtgtgactctggtaactagagatccctcagacccttttagtcagtgtggaaaatctctagca

SEQ ID NO: 67 - DNA, 8674 bp, Artificial Sequence
  Synthetic Sequence
tggaagggctaatttggtcccaaaaaagacaagagatccttgatctgtggatctaccacacacaaggctacttccctgattggcagaactacacaccagggccagggatcagatatccactgacctttggatggtgcttcaagttagtaccagttgaaccagagcaagtagaagaggccaatgaaggagagaacaacagcttgttacaccctatgagccagcatgggatggaggacccggagggagaagtattagtgtggaagtttgacagcctcctagcatttcgtcacatggcccgagagctgcatccggagtactacaaagactgctgacatcgagctttctacaagggactttccgctggggactttccagggaggtgtggcctgggcgggactggggagtggcgagccctcagatgctacatataagcagctgctttttgcctgtactgggtctctctggttagaccagatctgagcctgggagctctctggctaactagggaacccactgcttaagcctcaataaagcttgccttgagtgctcaaagtagtgtgtgcccgtctgttgtgtgactctggtaactagagatccctcagacccttttagtcagtgtggaaaatctctagcagtggcgcccgaacagggacttgaaagcgaaagtaaagccagaggagatctctcgacgcaggactcggcttgctgaagcgcgcacggcaagaggcgaggggcggcgactggtgagtacgccaaaaattttgactagcggaggctagaaggagagagatgggtgcgagagcgtcggtattaagcgggggagaattagataaatgggaaaaaattcggttaaggccagggggaaagaaacaatataaactaaaacatatagtatgggcaagcagggagctagaacgattcgcagttaatcctggccttttagagacatcagaaggctgtagacaaatactgggacagctacaaccatcccttcagacaggatcagaagaacttagatcattatataatacaatagcagtcctctattgtgtgcatcaaaggatagatgtaaaagacaccaaggaagccttagataagatagaggaagagcaaaacaaaagtaagaaaaaggcacagcaagcagcagctgacacaggaaacaacagccaggtcagccaaaattaccctatagtgcagaacctccaggggcaaatggtacatcaggccatatcacctagaactttaaatgcatgggtaaaagtagtagaagagaaggctttcagcccagaagtaatacccatgttttcagcattatcagaaggagccaccccacaagatttaaataccatgctaaacacagtggggggacatcaagcagccatgcaaatgttaaaagagaccatcaatgaggaagctgcagaatgggatagattgcatccagtgcatgcagggcctattgcaccaggccagatgagagaaccaaggggaagtgacatagcaggaactactagtacccttcaggaacaaataggatggatgacacataatccacctatcccagtaggagaaatctataaaagatggataatcctgggattaaataaaatagtaagaatgtatagccctaccagcattctggacataagacaaggaccaaaggaaccctttagagactatgtagaccgattctataaaactctaagagccgagcaagcttcacaagaggtaaaaaattggatgacagaaaccttgttggtccaaaatgcgaacccagattgtaagactattttaaaagcattgggaccaggagcgacactagaagaaatgatgacagcatgtcagggagtggggggacccggccataaagcaagagttttggctgaagcaatgagccaagtaacaaatccagctaccataatgatacagaaaggcaattttaggaaccaaagaaagactgttaagtgtttcaattgtggcaaagaagggcacatagccaaaaattgcagggcccctaggaaaaagggctgttggaaatgtggaaaggaaggacaccaaatgaaagattgtactgagagacaggctaattttttagggaagatctggccttcccacaagggaaggccagggaattttcttcagagcagaccagagccaacagccccaccagaagagagcttcaggtttggggaagagacaacaactccctctcagaagcaggagccgatagacaaggaactgtatcctttagcttccctcagatcactctttggcagcgacccctcgtcacaataaagataggggggcaattaaaggaagctctattagatacaggagcagatgatacagtattagaagaaatgaatttgccaggaagatggaaaccaaaaatgatagggggaattggaggttttatcaaagtaagacagtatgatcagatactcatagaaatctgcggacataaagctataggtacagtattagtaggacctacacctgtcaacataattggaagaaatctgttgactcagattggctgcactttaaattttcccattagtcctattgagactgtaccagtaaaattaaagccaggaatggatggcccaaaagttaaacaatggccattgacagaagaaaaaataaaagcattagtagaaatttgtacagaaatggaaaaggaaggaaaaatttcaaaaattgggcctgaaaatccatacaatactccagtatttgccataaagaaaaaagacagtactaaatggagaaaattagtagatttcagagaacttaataagagaactcaagatttctgggaagttcaattaggaataccacatcctgcagggttaaaacagaaaaaatcagtaacagtactggatgtgggcgatgcatatttttcagttcccttagataaagacttcaggaagtatactgcatttaccatacctagtataaacaatgagacaccagggattagatatcagtacaatgtgcttccacagggatggaaaggatcaccagcaatattccagtgtagcatgacaaaaatcttagagccttttagaaaacaaaatccagacatagtcatctatcaatacatggatgatttgtatgtaggatctgacttagaaatagggcagcatagaacaaaaatagaggaactgagacaacatctgttgaggtggggatttaccacaccagacaaaaaacatcagaaagaacctccattcctttggatgggttatgaactccatcctgataaatggacagtacagcctatagtgctgccagaaaaggacagctggactgtcaatgacatacagaaattagtgggaaaattgaattgggcaagtcagatttatgcagggattaaagtaaggcaattatgtaaacttcttaggggaaccaaagcactaacagaagtagtaccactaacagaagaagcagagctagaactggcagaaaacagggagattctaaaagaaccggtacatggagtgtattatgacccatcaaaagacttaatagcagaaatacagaagcaggggcaaggccaatggacatatcaaatttatcaagagccatttaaaaatctgaaaacaggaaagtatgcaagaatgaacgaatctgccgttgccatatacagcatctgaacaagctgatcgaacccttcatggacggttaaggccgcctgttggtgggcggggatcaagcaggaatttggcattccctacaatccccaaagtcaaggagtaatagaatctatgaataaagaattaaagaaaattataggacaggtaagagatcaggctgaacatcttaagacagcagtacaaatggcagtattcatccacaattttaaaagaaaaggggggattggggggtacagtgcaggggaaagaatagtagacataatagcaacagacatacaaactaaagaattacaaaaacaaattacaaaaattcaaaattttcgggtttattacagggacagcagagatccagtttggaaaggaccagcaaagctcctctggaaaggtgaaggggcagtagtaatacaagataatagtgacataaaagtagtgccaagaagaaaagcaaagatcatcagggattatggaaaacagatggcaggtgatgattgtgtggcaagtagacaggatgaggattaacacatggaaaagattagtaaaacaccatatgtatatttcaaggaaagctaaggactggttttatagacatcactatgaaagtactaatccaaaaataagttcagaagtacacatcccactaggggatgctaaattagtaataacaacatattggggtctgcatacaggagaaagagactggcatttgggtcagggagtctccatagaatggaggaaaaagagatatagcacacaagtagaccctgacctagcagaccaactaattcatctgcactattttgattgtttttcagaatctgctataagaaataccatattaggacgtatagttagtcctaggtgtgaatatcaagcaggacataacaaggtaggatctctacagtacttggcactagcagcattaataaaaccaaaacagataaagccacctttgcctagtgttaggaaactgacagaggacagatggaacaagccccagaagaccaagggccacagagggagccatacaatgaatggacactagagcttttagaggaacttaagagtgaagctgttagacattttcctaggatatggctccataacttaggacaacatatctatgaaacttacggggatacttgggcaggagtggaagccataataagaattctgcaacaactgctgtttatccatttcagaattgggtgtcgacatagcagaataggcgttactcgacagaggagagcaagaaatggagccagtagatcctagactagagccctggaagcatccaggaagtcagcctaaaactgcttgtaccaattgctattgtaaaaagtgttgctttcattgccaagtttgtttcatgacaaaagccttaggcatctcctatggcaggaagaagcggagacagcgacgaagagctcatcagaacagtcagactcatcaagcttctctatcaaagcagtaagtagtacatgtaatgcaacctataatagtagcaatagtagcattagtagtagcaataataatagcaatagttgtgtggtccatagtaatcatagaatataggaaaatattaagacaaagaaaaatagacaggttaattgatagactaatagaaagagcagaagacagtggcaatgagagtgaaggagaagtatcagcacttgtggagatgggggtggaaatggggcaccatgctccttgggatattgatgatctgtagtgctacagaaaaattgtgggtcacagtctattatggggtacctgtgtggaaggaagcaaccaccactctattttgtgcatcagatgctaaagcatatgatacagaggtacataatgtttgggccacacatgcctgtgtacccacagaccccaacccacaagaagtagtattggtaaatgtgacagaaaattttaacatgtggaaaaatgacatggtagaacagatgcatgaggatataatcagtttatgggatcaaagcctaaagccatgtgtaaaattaaccccactctgtgttagtttaaagtgcactgatttgaagaatgatactaataccaatagtagtagcgggagaatgataatggagaaaggagagataaaaaactgctctttcaatatcagcacaagcataagagataaggtgcagaaagaatatgcattcttttataaacttgatatagtaccaatagataataccagctataggttgataagttgtaacacctcagtcattacacaggcctgtccaaaggtatcctttgagccaattcccatacattattgtgccccggctggttttgcgattctaaaatgtaataataagacgttcaatggaacaggaccatgtacaaatgtcagcacagtacaatgtacacatggaatcaggccagtagtatcaactcaactgctgttaaatggcagtctagcagaagaagatgtagtaattagatctgccaatttcacagacaatgctaaaaccataatagtacagctgaacacatctgtagaaattaattgtacaagacccaacaacaatacaagaaaaagtatccgtatccagaggggaccagggagagcatttgttacaataggaaaaataggaaatatgagacaagcacattgtaacattagtagagcaaaatggaatgccactttaaaacagatagctagcaaattaagagaacaatttggaaataataaaacaataatctttaagcaatcctcaggaggggacccagaaattgtaacgcacagttttaattgtggaggggaatttttctactgtaattcaacacaactgtttaatagtacttggtttaatagtacttggagtactgaagggtcaaataacactgaaggaagtgacacaatcacactcccatgcagaataaaacaatttataaacatgtggcaggaagtaggaaaagcaatgtatgcccctcccatcagtggacaaattagatgttcatcaaatattactgggctgctattaacaagagatggtggtaataacaacaatgggtccgagatcttcagacctggaggaggcgatatgagggacaattggagaagtgaattatataaatataaagtagtaaaaattgaaccattaggagtagcacccaccaaggcaaagagaagagtggtgcagagagaaaaaagagcagtgggaataggagctttgttccttgggttcttgggagcagcaggaagcactatgggcgcagcgtcaatgacgctgacggtacaggccagacaattattgtctgatatagtgcagcagcagaacaatttgctgagggctattgaggcgcaacagcatctgttgcaactcacagtctggggcatcaaacagctccaggcaagaatcctggctgtggaaagatacctaaaggatcaacagctcctggggatttggggttgctctggaaaactcatttgcaccactgctgtgccttggaatgctagttggagtaataaatctctggaacagatttggaataacatgacctggatggagtgggacagagaaattaacaattacacaagcttaatacactccttaattgaagaatcgcaaaaccagcaagaaaagaatgaacaagaattattggaattagataaatgggcaagtttgtggaattggtttaacataacaaattggctgtggtatataaaattattcataatgatagtaggaggcttggtaggtttaagaatagtttttgctgtactttctatagtgaatagagttaggcagggatattcaccattatcgtttcagacccacctcccaatcccgaggggacccgacaggcccgaaggaatagaagaagaaggtggagagagagacagagacagatccattcgattagtgaacggatccttagcacttatctgggacgatctgcggagcctgtgcctcttcagctaccaccgcttgagagacttactcttgattgtaacgaggattgtggaacttctgggacgcagggggtgggaagccctcaaatattggtggaatctcctacagtattggagtcaggaactaaagaatagtgctgttaacttgctcaatgccacagccatagcagtagctgaggggacagatagggttatagaagtattacaagcagcttatagagctattcgccacatacctagaagaataagacagggcttggaaaggattttgctataagatgggtggcaagtggtcaaaaagtagtgtgattggatggcctgctgtaagggaaagaatgagacgagctgagccagcagcagatggggtgggagcagtatctcgagacctagaaaaacatggagcaatcacaagtagcaatacagcagctaacaatgctgcttgtgcctggctagaagcacaagaggaggaagaggtgggttttccagtcacacctcaggtacctttaagaccaatgacttacaaggcagctgtagatcttagccactttttaaaagaaaaggggggactggaagggctaattcactcccaaagaagacaagatatccttaccgtccatgaagggttcgatcgtaaagtgggatagttttttatggcaacggcagattcgttgagcctgcatggaatggatgaccctgagagagaagtgttagagtggaggtttgacagccgcctagcatttcatcacgtggcccgagagctgcatccggagtacttcaagaactgctgacatcgagcttgctacaagggactttccgctggggactttccagggaggcgtggcctgggcgggactggggagtggcgagccctcagatgctgcatataagcagctgctttttgcctgtactgggtctctctggttagaccagatctgagcctgggagctctctggctaactagggaacccactgcttaagcctcaataaagcttgccttgagtgcttcaagtagtgtgtgcccgtctgttgtgtgactctggtaactagagatccctcagacccttttagtcagtgtggaaaatctctagca

SEQ ID NO: 68 - DNA, 7862 bp, Artificial Sequence
  Synthetic Sequence
tggaagggctaatttggtcccaaaaaagacaagagatccttgatctgtggatctaccacacacaaggctacttccctgattggcagaactacacaccagggccagggatcagatatccactgacctttggatggtgcttcaagttagtaccagttgaaccagagcaagtagaagaggccaatgaaggagagaacaacagcttgttacaccctatgagccagcatgggatggaggacccggagggagaagtattagtgtggaagtttgacagcctcctagcatttcgtcacatggcccgagagctgcatccggagtactacaaagactgctgacatcgagctttctacaagggactttccgctggggactttccagggaggtgtggcctgggcgggactggggagtggcgagccctcagatgctacatataagcagctgctttttgcctgtactgggtctctctggttagaccagatctgagcctgggagctctctggctaactagggaacccactgcttaagcctcaataaagcttgccttgagtgctcaaagtagtgtgtgcccgtctgttgtgtgactctggtaactagagatccctcagacccttttagtcagtgtggaaaatctctagcagtggcgcccgaacagggacttgaaagcgaaagtaaagccagaggagatctctcgacgcaggactcggcttgctgaagcgcgcacggcaagaggcgaggggcggcgactggtgagtacgccaaaaattttgactagcggaggctagaaggagagagatgggtgcgagagcgtcggtattaagcgggggagaattagataaatgggaaaaaattcggttaaggccagggggaaagaaacaatataaactaaaacatatagtatgggcaagcagggagctagaacgattcgcagttaatcctggccttttagagacatcagaaggctgtagacaaatactgggacagctacaaccatcccttcagacaggatcagaagaacttagatcattatataatacaatagcagtcctctattgtgtgcatcaaaggatagatgtaaaagacaccaaggaagccttagataagatagaggaagagcaaaacaaaagtaagaaaaaggcacagcaagcagcagctgacacaggaaacaacagccaggtcagccaaaattaccctatagtgcagaacctccaggggcaaatggtacatcaggccatatcacctagaactttaaatgcatgggtaaaagtagtagaagagaaggctttcagcccagaagtaatacccatgttttcagcattatcagaaggagccaccccacaagatttaaataccatgctaaacacagtggggggacatcaagcagccatgcaaatgttaaaagagaccatcaatgaggaagctgcagaatgggatagattgcatccagtgcatgcagggcctattgcaccaggccagatgagagaaccaaggggaagtgacatagcaggaactactagtacccttcaggaacaaataggatggatgacacataatccacctatcccagtaggagaaatctataaaagatggataatcctgggattaaataaaatagtaagaatgtatagccctaccagcattctggacataagacaaggaccaaaggaaccctttagagactatgtagaccgattctataaaactctaagagccgagcaagcttcacaagaggtaaaaaattggatgacagaaaccttgttggtccaaaatgcgaacccagattgtaagactattttaaaagcattgggaccaggagcgacactagaagaaatgatgacagcatgtcagggagtggggggacccggccataaagcaagagttttggctgaagcaatgagccaagtaacaaatccagctaccataatgatacagaaaggcaattttaggaaccaaagaaagactgttaagtgtttcaattgtggcaaagaagggcacatagccaaaaattgcagggcccctaggaaaaagggctgttggaaatgtggaaaggaaggacaccaaatgaaagattgtactgagagacaggctaattttttagggaagatctggccttcccacaagggaaggccagggaattttcttcagagcagaccagagccaacagccccaccagaagagagcttcaggtttggggaagagacaacaactccctctcagaagcaggagccgatagacaaggaactgtatcctttagcttccctcagatcactctttggcagcgacccctcgtcacaataaagataggggggcaattaaaggaagctctattagatacaggagcagatgatacagtattagaagaaatgaatttgccaggaagatggaaaccaaaaatgatagggggaattggaggttttatcaaagtaagacagtatgatcagatactcatagaaatctgcggacataaagctataggtacagtattagtaggacctacacctgtcaacataattggaagaaatctgttgactcagattggctgcactttaaattttcccattagtcctattgagactgtaccagtaaaattaaagccaggaatggatggcccaaaagttaaacaatggccattgacagaagaaaaaataaaagcattagtagaaatttgtacagaaatggaaaaggaaggaaaaatttcaaaaattgggcctgaaaatccatacaatactccagtatttgccataaagaaaaaagacagtactaaatggagaaaattagtagatttcagagaacttaataagagaactcaagatttctgggaagttcaattaggaataccacatcctgcagggttaaaacagaaaaaatcagtaacagtactggatgtgggcgatgcatatttttcagttcccttagataaagacttcaggaagtatactgcatttaccatacctagtataaacaatgagacaccagggattagatatcagtacaatgtgcttccacagggatggaaaggatcaccagcaatattccagtgtagcatgacaaaaatcttagagccttttagaaaacaaaatccagacatagtcatctatcaatacatggatgatttgtatgtaggatctgacttagaaatagggcagcatagaacaaaaatagaggaactgagacaacatctgttgaggtggggatttaccacaccagacaaaaaacatcagaaagaacctccattcctttggatgggttatgaactccatcctgataaatggacagtacagcctatagtgctgccagaaaaggacagctggactgtcaatgacatacagaaattagtgggaaaattgaattgggcaagtcagatttatgcagggattaaagtaaggcaattatgtaaacttcttaggggaaccaaagcactaacagaagtagtaccactaacagaagaagcagagctagaactggcagaaaacagggagattctaaaagaaccggtacatggagtgtattatgacccatcaaaagacttaatagcagaaatacagaagcaggggcaaggccaatggacatatcaaatttatcaagagccatttaaaaatctgaaaacaggaaagtatgcaagaatgaacgaatctgccgttgccatatacagcatctgaacaagctgatcgaacccttcatggacggttaaggccgcctgttggtgggcggggatcaagcaggaatttggcattccctacaatccccaaagtcaaggagtaatagaatctatgaataaagaattaaagaaaattataggacaggtaagagatcaggctgaacatcttaagacagcagtacaaatggcagtattcatccacaattttaaaagaaaaggggggattggggggtacagtgcaggggaaagaatagtagacataatagcaacagacatacaaactaaagaattacaaaaacaaattacaaaaattcaaaattttcgggtttattacagggacagcagagatccagtttggaaaggaccagcaaagctcctctggaaaggtgaaggggcagtagtaatacaagataatagtgacataaaagtagtgccaagaagaaaagcaaagatcatcagggattatggaaaacagatggcaggtgatgattgtgtggcccgtccatgaagggttcgattcttgaacagcgcggtctgttatggcaacggcagattcgtttaatgcaacctataatagtagcaatagtagcattagtagtagcaataataatagcaatagttgtgtggtccatagtaatcatagaatataggaaaatattaagacaaagaaaaatagacaggttaattgatagactaatagaaagagcagaagacagtggcaatgagagtgaaggagaagtatcagcacttgtggagatgggggtggaaatggggcaccatgctccttgggatattgatgatctgtagtgctacagaaaaattgtgggtcacagtctattatggggtacctgtgtggaaggaagcaaccaccactctattttgtgcatcagatgctaaagcatatgatacagaggtacataatgtttgggccacacatgcctgtgtacccacagaccccaacccacaagaagtagtattggtaaatgtgacagaaaattttaacatgtggaaaaatgacatggtagaacagatgcatgaggatataatcagtttatgggatcaaagcctaaagccatgtgtaaaattaaccccactctgtgttagtttaaagtgcactgatttgaagaatgatactaataccaatagtagtagcgggagaatgataatggagaaaggagagataaaaaactgctctttcaatatcagcacaagcataagagataaggtgcagaaagaatatgcattcttttataaacttgatatagtaccaatagataataccagctataggttgataagttgtaacacctcagtcattacacaggcctgtccaaaggtatcctttgagccaattcccatacattattgtgccccggctggttttgcgattctaaaatgtaataataagacgttcaatggaacaggaccatgtacaaatgtcagcacagtacaatgtacacatggaatcaggccagtagtatcaactcaactgctgttaaatggcagtctagcagaagaagatgtagtaattagatctgccaatttcacagacaatgctaaaaccataatagtacagctgaacacatctgtagaaattaattgtacaagacccaacaacaatacaagaaaaagtatccgtatccagaggggaccagggagagcatttgttacaataggaaaaataggaaatatgagacaagcacattgtaacattagtagagcaaaatggaatgccactttaaaacagatagctagcaaattaagagaacaatttggaaataataaaacaataatctttaagcaatcctcaggaggggacccagaaattgtaacgcacagttttaattgtggaggggaatttttctactgtaattcaacacaactgtttaatagtacttggtttaatagtacttggagtactgaagggtcaaataacactgaaggaagtgacacaatcacactcccatgcagaataaaacaatttataaacatgtggcaggaagtaggaaaagcaatgtatgcccctcccatcagtggacaaattagatgttcatcaaatattactgggctgctattaacaagagatggtggtaataacaacaatgggtccgagatcttcagacctggaggaggcgatatgagggacaattggagaagtgaattatataaatataaagtagtaaaaattgaaccattaggagtagcacccaccaaggcaaagagaagagtggtgcagagagaaaaaagagcagtgggaataggagctttgttccttgggttcttgggagcagcaggaagcactatgggcgcagcgtcaatgacgctgacggtacaggccagacaattattgtctgatatagtgcagcagcagaacaatttgctgagggctattgaggcgcaacagcatctgttgcaactcacagtctggggcatcaaacagctccaggcaagaatcctggctgtggaaagatacctaaaggatcaacagctcctggggatttggggttgctctggaaaactcatttgcaccactgctgtgccttggaatgctagttggagtaataaatctctggaacagatttggaataacatgacctggatggagtgggacagagaaattaacaattacacaagcttaatacactccttaattgaagaatcgcaaaaccagcaagaaaagaatgaacaagaattattggaattagataaatgggcaagtttgtggaattggtttaacataacaaattggctgtggtatataaaattattcataatgatagtaggaggcttggtaggtttaagaatagtttttgctgtactttctatagtgaatagagttaggcagggatattcaccattatcgtttcagacccacctcccaatcccgaggggacccgacaggcccgaaggaatagaagaagaaggtggagagagagacagagacagatccattcgattagtgaacggatccttagcacttatctgggacgatctgcggagcctgtgcctcttcagctaccaccgcttgagagacttactcttgattgtaacgaggattgtggaacttctgggacgcagggggtgggaagccctcaaatattggtggaatctcctacagtattggagtcaggaactaaagaatagtgctgttaacttgctcaatgccacagccatagcagtagctgaggggacagatagggttatagaagtattacaagcagcttatagagctattcgccacatacctagaagaataagacagggcttggaaaggattttgctataagatgggtggcaagtggtcaaaaagtagtgtgattggatggcctgctgtaagggaaagaatgagacgagctgagccagcagcagatggggtgggagcagtatctcgagacctagaaaaacatggagcaatcacaagtagcaatacagcagctaacaatgctgcttgtgcctggctagaagcacaagaggaggaagaggtgggttttccagtcacacctcaggtacctttaagaccaatgacttacaaggcagctgtagatcttagccactttttaaaagaaaaggggggactggaagggctaattcactcccaaagaagacaagatatccttgatctgtggatctaccacacacaaggctacttccctgattggcagaactacacaccagggccaggggtcagatatccactgacctttggatggtgctacaagctagtaccagttgagccagataaggtagaagaggccaataaaggagagaacaccagcttgttacaccctgtgagcctgcatggaatggatgaccctgagagagaagtgttagagtggaggtttgacagccgcctagcatttcatcacgtggcccgagagctgcatccggagtacttcaagaactgctgacatcgagcttgctacaagggactttccgctggggactttccagggaggcgtggcctgggcgggactggggagtggcgagccctcagatgctgcatataagcagctgctttttgcctgtactgggtctctctggttagaccagatctgagcctgggagctctctggctaactagggaacccactgcttaagcctcaataaagcttgccttgagtgcttcaagtagtgtgtgcccgtctgttgtgtgactctggtaactagagatccctcagacccttttagtcagtgtggaaaatctctagca

SEQ ID NO: 69 - DNA, 7751 bp, Artificial Sequence
  Synthetic Sequence
tggaagggctaatttggtcccaaaaaagacaagagatccttgatctgtggatctaccacacacaaggctacttccctgattggcagaactacacaccagggccagggatcagatatccactgacctttggatggtgcttcaagttagtaccagttgaaccagagcaagtagaagaggccaatgaaggagagaacaacagcttgttacaccctatgagccagcatgggatggaggacccggagggagaagtattagtgtggaagtttgacagcctcctagcatttcgtcacatggcccgagagctgcatccggagtactacaaagactgctgacatcgagctttctacaagggactttccgctggggactttccagggaggtgtggcctgggcgggactggggagtggcgagccctcagatgctacatataagcagctgctttttgcctgtactgggtctctctggttagaccagatctgagcctgggagctctctggctaactagggaacccactgcttaagcctcaataaagcttgccttgagtgctcaaagtagtgtgtgcccgtctgttgtgtgactctggtaactagagatccctcagacccttttagtcagtgtggaaaatctctagcagtggcgcccgaacagggacttgaaagcgaaagtaaagccagaggagatctctcgacgcaggactcggcttgctgaagcgcgcacggcaagaggcgaggggcggcgactggtgagtacgccaaaaattttgactagcggaggctagaaggagagagatgggtgcgagagcgtcggtattaagcgggggagaattagataaatgggaaaaaattcggttaaggccagggggaaagaaacaatataaactaaaacatatagtatgggcaagcagggagctagaacgattcgcagttaatcctggccttttagagacatcagaaggctgtagacaaatactgggacagctacaaccatcccttcagacaggatcagaagaacttagatcattatataatacaatagcagtcctctattgtgtgcatcaaaggatagatgtaaaagacaccaaggaagccttagataagatagaggaagagcaaaacaaaagtaagaaaaaggcacagcaagcagcagctgacacaggaaacaacagccaggtcagccaaaattaccctatagtgcagaacctccaggggcaaatggtacatcaggccatatcacctagaactttaaatgcatgggtaaaagtagtagaagagaaggctttcagcccagaagtaatacccatgttttcagcattatcagaaggagccaccccacaagatttaaataccatgctaaacacagtggggggacatcaagcagccatgcaaatgttaaaagagaccatcaatgaggaagctgcagaatgggatagattgcatccagtgcatgcagggcctattgcaccaggccagatgagagaaccaaggggaagtgacatagcaggaactactagtacccttcaggaacaaataggatggatgacacataatccacctatcccagtaggagaaatctataaaagatggataatcctgggattaaataaaatagtaagaatgtatagccctaccagcattctggacataagacaaggaccaaaggaaccctttagagactatgtagaccgattctataaaactctaagagccgagcaagcttcacaagaggtaaaaaattggatgacagaaaccttgttggtccaaaatgcgaacccagattgtaagactattttaaaagcattgggaccaggagcgacactagaagaaatgatgacagcatgtcagggagtggggggacccggccataaagcaagagttttggctgaagcaatgagccaagtaacaaatccagctaccataatgatacagaaaggcaattttaggaaccaaagaaagactgttaagtgtttcaattgtggcaaagaagggcacatagccaaaaattgcagggcccctaggaaaaagggctgttggaaatgtggaaaggaaggacaccaaatgaaagattgtactgagagacaggctaattttttagggaagatctggccttcccacaagggaaggccagggaattttcttcagagcagaccagagccaacagccccaccagaagagagcttcaggtttggggaagagacaacaactccctctcagaagcaggagccgatagacaaggaactgtatcctttagcttccctcagatcactctttggcagcgacccctcgtcacaataaagataggggggcaattaaaggaagctctattagatacaggagcagatgatacagtattagaagaaatgaatttgccaggaagatggaaaccaaaaatgatagggggaattggaggttttatcaaagtaagacagtatgatcagatactcatagaaatctgcggacataaagctataggtacagtattagtaggacctacacctgtcaacataattggaagaaatctgttgactcagattggctgcactttaaattttcccattagtcctattgagactgtaccagtaaaattaaagccaggaatggatggcccaaaagttaaacaatggccattgacagaagaaaaaataaaagcattagtagaaatttgtacagaaatggaaaaggaaggaaaaatttcaaaaattgggcctgaaaatccatacaatactccagtatttgccataaagaaaaaagacagtactaaatggagaaaattagtagatttcagagaacttaataagagaactcaagatttctgggaagttcaattaggaataccacatcctgcagggttaaaacagaaaaaatcagtaacagtactggatgtgggcgatgcatatttttcagttcccttagataaagacttcaggaagtatactgcatttaccatacctagtataaacaatgagacaccagggattagatatcagtacaatgtgcttccacagggatggaaaggatcaccagcaatattccagtgtagcatgacaaaaatcttagagccttttagaaaacaaaatccagacatagtcatctatcaatacatggatgatttgtatgtaggatctgacttagaaatagggcagcatagaacaaaaatagaggaactgagacaacatctgttgaggtggggatttaccacaccagacaaaaaacatcagaaagaacctccattcctttggatgggttatgaactccatcctgataaatggacagtacagcctatagtgctgccagaaaaggacagctggactgtcaatgacatacagaaattagtgggaaaattgaattgggcaagtcagatttatgcagggattaaagtaaggcaattatgtaaacttcttaggggaaccaaagcactaacagaagtagtaccactaacagaagaagcagagctagaactggcagaaaacagggagattctaaaagaaccggtacatggagtgtattatgacccatcaaaagacttaatagcagaaatacagaagcaggggcaaggccaatggacatatcaaatttatcaagagccatttaaaaatctgaaaacaggaaagtatgcaagaatgaacgaatctgccgttgccatatacagcatctgaacaagctgatcgaacccttcatggacggttaaggccgcctgttggtgggcggggatcaagcaggaatttggcattccctacaatccccaaagtcaaggagtaatagaatctatgaataaagaattaaagaaaattataggacaggtaagagatcaggctgaacatcttaagacagcagtacaaatggcagtattcatccacaattttaaaagaaaaggggggattggggggtacagtgcaggggaaagaatagtagacataatagcaacagacatacaaactaaagaattacaaaaacaaattacaaaaattcaaaattttcgggtttattacagggacagcagagatccagtttggaaaggaccagcaaagctcctctggaaaggtgaaggggcagtagtaatacaagataatagtgacataaaagtagtgccaagaagaaaagcaaagatcatcagggattatggaaaacagatggcaggtgatgattgtgtggcccgtccatgaagggttcgattcttgaacagcgcggtctgttatggcaacggcagattcgtttaatgcaacctataatagtagcaatagtagcattagtagtagcaataataatagcaatagttgtgtggtccatagtaatcatagaatataggaaaatattaagacaaagaaaaatagacaggttaattgatagactaatagaaagagcagaagacagtggcaatgagagtgaaggagaagtatcagcacttgtggagatgggggtggaaatggggcaccatgctccttgggatattgatgatctgtagtgctacagaaaaattgtgggtcacagtctattatggggtacctgtgtggaaggaagcaaccaccactctattttgtgcatcagatgctaaagcatatgatacagaggtacataatgtttgggccacacatgcctgtgtacccacagaccccaacccacaagaagtagtattggtaaatgtgacagaaaattttaacatgtggaaaaatgacatggtagaacagatgcatgaggatataatcagtttatgggatcaaagcctaaagccatgtgtaaaattaaccccactctgtgttagtttaaagtgcactgatttgaagaatgatactaataccaatagtagtagcgggagaatgataatggagaaaggagagataaaaaactgctctttcaatatcagcacaagcataagagataaggtgcagaaagaatatgcattcttttataaacttgatatagtaccaatagataataccagctataggttgataagttgtaacacctcagtcattacacaggcctgtccaaaggtatcctttgagccaattcccatacattattgtgccccggctggttttgcgattctaaaatgtaataataagacgttcaatggaacaggaccatgtacaaatgtcagcacagtacaatgtacacatggaatcaggccagtagtatcaactcaactgctgttaaatggcagtctagcagaagaagatgtagtaattagatctgccaatttcacagacaatgctaaaaccataatagtacagctgaacacatctgtagaaattaattgtacaagacccaacaacaatacaagaaaaagtatccgtatccagaggggaccagggagagcatttgttacaataggaaaaataggaaatatgagacaagcacattgtaacattagtagagcaaaatggaatgccactttaaaacagatagctagcaaattaagagaacaatttggaaataataaaacaataatctttaagcaatcctcaggaggggacccagaaattgtaacgcacagttttaattgtggaggggaatttttctactgtaattcaacacaactgtttaatagtacttggtttaatagtacttggagtactgaagggtcaaataacactgaaggaagtgacacaatcacactcccatgcagaataaaacaatttataaacatgtggcaggaagtaggaaaagcaatgtatgcccctcccatcagtggacaaattagatgttcatcaaatattactgggctgctattaacaagagatggtggtaataacaacaatgggtccgagatcttcagacctggaggaggcgatatgagggacaattggagaagtgaattatataaatataaagtagtaaaaattgaaccattaggagtagcacccaccaaggcaaagagaagagtggtgcagagagaaaaaagagcagtgggaataggagctttgttccttgggttcttgggagcagcaggaagcactatgggcgcagcgtcaatgacgctgacggtacaggccagacaattattgtctgatatagtgcagcagcagaacaatttgctgagggctattgaggcgcaacagcatctgttgcaactcacagtctggggcatcaaacagctccaggcaagaatcctggctgtggaaagatacctaaaggatcaacagctcctggggatttggggttgctctggaaaactcatttgcaccactgctgtgccttggaatgctagttggagtaataaatctctggaacagatttggaataacatgacctggatggagtgggacagagaaattaacaattacacaagcttaatacactccttaattgaagaatcgcaaaaccagcaagaaaagaatgaacaagaattattggaattagataaatgggcaagtttgtggaattggtttaacataacaaattggctgtggtatataaaattattcataatgatagtaggaggcttggtaggtttaagaatagtttttgctgtactttctatagtgaatagagttaggcagggatattcaccattatcgtttcagacccacctcccaatcccgaggggacccgacaggcccgaaggaatagaagaagaaggtggagagagagacagagacagatccattcgattagtgaacggatccttagcacttatctgggacgatctgcggagcctgtgcctcttcagctaccaccgcttgagagacttactcttgattgtaacgaggattgtggaacttctgggacgcagggggtgggaagccctcaaatattggtggaatctcctacagtattggagtcaggaactaaagaatagtgctgttaacttgctcaatgccacagccatagcagtagctgaggggacagatagggttatagaagtattacaagcagcttatagagctattcgccacatacctagaagaataagacagggcttggaaaggattttgctataagatgggtggcaagtggtcaaaaagtagtgtgattggatggcctgctgtaagggaaagaatgagacgagctgagccagcagcagatggggtgggagcagtatctcgagacctagaaaaacatggagcaatcacaagtagcaatacagcagctaacaatgctgcttgtgcctggctagaagcacaagaggaggaagaggtgggttttccagtcacacctcaggtacctttaagaccaatgacttacaaggcagctgtagatcttagccactttttaaaagaaaaggggggactggaagggctaattcactcccaaagaagacaagatatccttaccgtccatgaagggttcgatcgtaaagtgggatagttttttatggcaacggcagattcgttgagcctgcatggaatggatgaccctgagagagaagtgttagagtggaggtttgacagccgcctagcatttcatcacgtggcccgagagctgcatccggagtacttcaagaactgctgacatcgagcttgctacaagggactttccgctggggactttccagggaggcgtggcctgggcgggactggggagtggcgagccctcagatgctgcatataagcagctgctttttgcctgtactgggtctctctggttagaccagatctgagcctgggagctctctggctaactagggaacccactgcttaagcctcaataaagcttgccttgagtgcttcaagtagtgtgtgcccgtctgttgtgtgactctggtaactagagatccctcagacccttttagtcagtgtggaaaatctctagca

SEQ ID NO: 70 - DNA, 7801 bp, Artificial Sequence
  Synthetic Sequence
tggaagggctaatttggtcccaaaaaagacaagagatccttgatctgtggatctaccacacacaaggctacttccctgattggcagaactacacaccagggccagggatcagatatccactgacctttggatggtgcttcaagttagtaccagttgaaccagagcaagtagaagaggccaatgaaggagagaacaacagcttgttacaccctatgagccagcatgggatggaggacccggagggagaagtattagtgtggaagtttgacagcctcctagcatttcgtcacatggcccgagagctgcatccggagtactacaaagactgctgacatcgagctttctacaagggactttccgctggggactttccagggaggtgtggcctgggcgggactggggagtggcgagccctcagatgctacatataagcagctgctttttgcctgtactgggtctctctggttagaccagatctgagcctgggagctctctggctaactagggaacccactgcttaagcctcaataaagcttgccttgagtgctcaaagtagtgtgtgcccgtctgttgtgtgactctggtaactagagatccctcagacccttttagtcagtgtggaaaatctctagcagtggcgcccgaacagggacttgaaagcgaaagtaaagccagaggagatctctcgacgcaggactcggcttgctgaagcgcgcacggcaagaggcgaggggcggcgactggtgagtacgccaaaaattttgactagcggaggctagaaggagagagatgggtgcgagagcgtcggtattaagcgggggagaattagataaatgggaaaaaattcggttaaggccagggggaaagaaacaatataaactaaaacatatagtatgggcaagcagggagctagaacgattcgcagttaatcctggccttttagagacatcagaaggctgtagacaaatactgggacagctacaaccatcccttcagacaggatcagaagaacttagatcattatataatacaatagcagtcctctattgtgtgcatcaaaggatagatgtaaaagacaccaaggaagccttagataagatagaggaagagcaaaacaaaagtaagaaaaaggcacagcaagcagcagctgacacaggaaacaacagccaggtcagccaaaattaccctatagtgcagaacctccaggggcaaatggtacatcaggccatatcacctagaactttaaatgcatgggtaaaagtagtagaagagaaggctttcagcccagaagtaatacccatgttttcagcattatcagaaggagccaccccacaagatttaaataccatgctaaacacagtggggggacatcaagcagccatgcaaatgttaaaagagaccatcaatgaggaagctgcagaatgggatagattgcatccagtgcatgcagggcctattgcaccaggccagatgagagaaccaaggggaagtgacatagcaggaactactagtacccttcaggaacaaataggatggatgacacataatccacctatcccagtaggagaaatctataaaagatggataatcctgggattaaataaaatagtaagaatgtatagccctaccagcattctggacataagacaaggaccaaaggaaccctttagagactatgtagaccgattctataaaactctaagagccgagcaagcttcacaagaggtaaaaaattggatgacagaaaccttgttggtccaaaatgcgaacccagattgtaagactattttaaaagcattgggaccaggagcgacactagaagaaatgatgacagcatgtcagggagtggggggacccggccataaagcaagagttttggctgaagcaatgagccaagtaacaaatccagctaccataatgatacagaaaggcaattttaggaaccaaagaaagactgttaagtgtttcaattgtggcaaagaagggcacatagccaaaaattgcagggcccctaggaaaaagggctgttggaaatgtggaaaggaaggacaccaaatgaaagattgtactgagagacaggctaattttttagggaagatctggccttcccacaagggaaggccagggaattttcttcagagcagaccagagccaacagccccaccagaagagagcttcaggtttggggaagagacaacaactccctctcagaagcaggagccgatagacaaggaactgtatcctttagcttccctcagatcactctttggcagcgacccctcgtcacaataaagataggggggcaattaaaggaagctctattagatacaggagcagatgatacagtattagaagaaatgaatttgccaggaagatggaaaccaaaaatgatagggggaattggaggttttatcaaagtaagacagtatgatcagatactcatagaaatctgcggacataaagctataggtacagtattagtaggacctacacctgtcaacataattggaagaaatctgttgactcagattggctgcactttaaattttcccattagtcctattgagactgtaccagtaaaattaaagccaggaatggatggcccaaaagttaaacaatggccattgacagaagaaaaaataaaagcattagtagaaatttgtacagaaatggaaaaggaaggaaaaatttcaaaaattgggcctgaaaatccatacaatactccagtatttgccataaagaaaaaagacagtactaaatggagaaaattagtagatttcagagaacttaataagagaactcaagatttctgggaagttcaattaggaataccacatcctgcagggttaaaacagaaaaaatcagtaacagtactggatgtgggcgatgcatatttttcagttcccttagataaagacttcaggaagtatactgcatttaccatacctagtataaacaatgagacaccagggattagatatcagtacaatgtgcttccacagggatggaaaggatcaccagcaatattccagtgtagcatgacaaaaatcttagagccttttagaaaacaaaatccagacatagtcatctatcaatacatggatgatttgtatgtaggatctgacttagaaatagggcagcatagaacaaaaatagaggaactgagacaacatctgttgaggtggggatttaccacaccagacaaaaaacatcagaaagaacctccattcctttggatgggttatgaactccatcctgataaatggacagtacagcctatagtgctgccagaaaaggacagctggactgtcaatgacatacagaaattagtgggaaaattgaattgggcaagtcagatttatgcagggattaaagtaaggcaattatgtaaacttcttaggggaaccaaagcactaacagaagtagtaccactaacagaagaagcagagctagaactggcagaaaacagggagattctaaaagaaccggtacatggagtgtattatgacccatcaaaagacttaatagcagaaatacagaagcaggggcaaggccaatggacatatcaaatttatcaagagccatttaaaaatctgaaaacaggaaagtatgcaagaatgaacgaatctgccgttgccatatacagcatctgaacaagctgatcgaacccttcatggacggttaaggccgcctgttggtgggcggggatcaagcaggaatttggcattccctacaatccccaaagtcaaggagtaatagaatctatgaataaagaattaaagaaaattataggacaggtaagagatcaggctgaacatcttaagacagcagtacaaatggcagtattcatccacaattttaaaagaaaaggggggattggggggtacagtgcaggggaaagaatagtagacataatagcaacagacatacaaactaaagaattacaaaaacaaattacaaaaattcaaaattttcgggtttattacagggacagcagagatccagtttggaaaggaccagcaaagctcctctggaaaggtgaaggggcagtagtaatacaagataatagtgacataaaagtagtgccaagaagaaaagcaaagatcatcagggattatggaaaacagatggcaggtgatgattgtgtggctaatgcaacctataatagtagcaatagtagcattagtagtagcaataataatagcaatagttgtgtggtccatagtaatcatagaatataggaaaatattaagacaaagaaaaatagacaggttaattgatagactaatagaaagagcagaagacagtggcaatgagagtgaaggagaagtatcagcacttgtggagatgggggtggaaatggggcaccatgctccttgggatattgatgatctgtagtgctacagaaaaattgtgggtcacagtctattatggggtacctgtgtggaaggaagcaaccaccactctattttgtgcatcagatgctaaagcatatgatacagaggtacataatgtttgggccacacatgcctgtgtacccacagaccccaacccacaagaagtagtattggtaaatgtgacagaaaattttaacatgtggaaaaatgacatggtagaacagatgcatgaggatataatcagtttatgggatcaaagcctaaagccatgtgtaaaattaaccccactctgtgttagtttaaagtgcactgatttgaagaatgatactaataccaatagtagtagcgggagaatgataatggagaaaggagagataaaaaactgctctttcaatatcagcacaagcataagagataaggtgcagaaagaatatgcattcttttataaacttgatatagtaccaatagataataccagctataggttgataagttgtaacacctcagtcattacacaggcctgtccaaaggtatcctttgagccaattcccatacattattgtgccccggctggttttgcgattctaaaatgtaataataagacgttcaatggaacaggaccatgtacaaatgtcagcacagtacaatgtacacatggaatcaggccagtagtatcaactcaactgctgttaaatggcagtctagcagaagaagatgtagtaattagatctgccaatttcacagacaatgctaaaaccataatagtacagctgaacacatctgtagaaattaattgtacaagacccaacaacaatacaagaaaaagtatccgtatccagaggggaccagggagagcatttgttacaataggaaaaataggaaatatgagacaagcacattgtaacattagtagagcaaaatggaatgccactttaaaacagatagctagcaaattaagagaacaatttggaaataataaaacaataatctttaagcaatcctcaggaggggacccagaaattgtaacgcacagttttaattgtggaggggaatttttctactgtaattcaacacaactgtttaatagtacttggtttaatagtacttggagtactgaagggtcaaataacactgaaggaagtgacacaatcacactcccatgcagaataaaacaatttataaacatgtggcaggaagtaggaaaagcaatgtatgcccctcccatcagtggacaaattagatgttcatcaaatattactgggctgctattaacaagagatggtggtaataacaacaatgggtccgagatcttcagacctggaggaggcgatatgagggacaattggagaagtgaattatataaatataaagtagtaaaaattgaaccattaggagtagcacccaccaaggcaaagagaagagtggtgcagagagaaaaaagagcagtgggaataggagctttgttccttgggttcttgggagcagcaggaagcactatgggcgcagcgtcaatgacgctgacggtacaggccagacaattattgtctgatatagtgcagcagcagaacaatttgctgagggctattgaggcgcaacagcatctgttgcaactcacagtctggggcatcaaacagctccaggcaagaatcctggctgtggaaagatacctaaaggatcaacagctcctggggatttggggttgctctggaaaactcatttgcaccactgctgtgccttggaatgctagttggagtaataaatctctggaacagatttggaataacatgacctggatggagtgggacagagaaattaacaattacacaagcttaatacactccttaattgaagaatcgcaaaaccagcaagaaaagaatgaacaagaattattggaattagataaatgggcaagtttgtggaattggtttaacataacaaattggctgtggtatataaaattattcataatgatagtaggaggcttggtaggtttaagaatagtttttgctgtactttctatagtgaatagagttaggcagggatattcaccattatcgtttcagacccacctcccaatcccgaggggacccgacaggcccgaaggaatagaagaagaaggtggagagagagacagagacagatccattcgattagtgaacggatccttagcacttatctgggacgatctgcggagcctgtgcctcttcagctaccaccgcttgagagacttactcttgattgtaacgaggattgtggaacttctgggacgcagggggtgggaagccctcaaatattggtggaatctcctacagtattggagtcaggaactaaagaatagtgctgttaacttgctcaatgccacagccatagcagtagctgaggggacagatagggttatagaagtattacaagcagcttatagagctattcgccacatacctagaagaataagacagggcttggaaaggattttgctataagatgggtggcaagtggtcaaaaagtagtgtgattggatggcctgctgtaagggaaagaatgagacgagctgagccagcagcagatggggtgggagcagtatctcgagacctagaaaaacatggagcaatcacaagtagcaatacagcagctaacaatgctgcttgtgcctggctagaagcacaagaggaggaagaggtgggttttccagtcacacctcaggtacctttaagaccaatgacttacaaggcagctgtagatcttagccactttttaaaagaaaaggggggactggaagggctaattcactcccaaagaagacaagatatccttgatctgtggatctaccacacacaaggctacttccctgattggcagaactacacaccagggccaggggtcagatatccactgacctttggatggtgctacaagctagtaccagttgagccagataaggtagaagaggccaataaaggagagaacaccagcttgttacaccctgtgagcctgcatggaatggatgaccctgagagagaagtgttagagtggaggtttgacagccgcctagcatttcatcacgtggcccgagagctgcatccggagtacttcaagaactgctgacatcgagcttgctacaagggactttccgctggggactttccagggaggcgtggcctgggcgggactggggagtggcgagccctcagatgctgcatataagcagctgctttttgcctgtactgggtctctctggttagaccagatctgagcctgggagctctctggctaactagggaacccactgcttaagcctcaataaagcttgccttgagtgcttcaagtagtgtgtgcccgtctgttgtgtgactctggtaactagagatccctcagacccttttagtcagtgtggaaaatctctagca

SEQ ID NO: 71 - DNA, 7690 bp, Artificial Sequence
  Synthetic Sequence
tggaagggctaatttggtcccaaaaaagacaagagatccttgatctgtggatctaccacacacaaggctacttccctgattggcagaactacacaccagggccagggatcagatatccactgacctttggatggtgcttcaagttagtaccagttgaaccagagcaagtagaagaggccaatgaaggagagaacaacagcttgttacaccctatgagccagcatgggatggaggacccggagggagaagtattagtgtggaagtttgacagcctcctagcatttcgtcacatggcccgagagctgcatccggagtactacaaagactgctgacatcgagctttctacaagggactttccgctggggactttccagggaggtgtggcctgggcgggactggggagtggcgagccctcagatgctacatataagcagctgctttttgcctgtactgggtctctctggttagaccagatctgagcctgggagctctctggctaactagggaacccactgcttaagcctcaataaagcttgccttgagtgctcaaagtagtgtgtgcccgtctgttgtgtgactctggtaactagagatccctcagacccttttagtcagtgtggaaaatctctagcagtggcgcccgaacagggacttgaaagcgaaagtaaagccagaggagatctctcgacgcaggactcggcttgctgaagcgcgcacggcaagaggcgaggggcggcgactggtgagtacgccaaaaattttgactagcggaggctagaaggagagagatgggtgcgagagcgtcggtattaagcgggggagaattagataaatgggaaaaaattcggttaaggccagggggaaagaaacaatataaactaaaacatatagtatgggcaagcagggagctagaacgattcgcagttaatcctggccttttagagacatcagaaggctgtagacaaatactgggacagctacaaccatcccttcagacaggatcagaagaacttagatcattatataatacaatagcagtcctctattgtgtgcatcaaaggatagatgtaaaagacaccaaggaagccttagataagatagaggaagagcaaaacaaaagtaagaaaaaggcacagcaagcagcagctgacacaggaaacaacagccaggtcagccaaaattaccctatagtgcagaacctccaggggcaaatggtacatcaggccatatcacctagaactttaaatgcatgggtaaaagtagtagaagagaaggctttcagcccagaagtaatacccatgttttcagcattatcagaaggagccaccccacaagatttaaataccatgctaaacacagtggggggacatcaagcagccatgcaaatgttaaaagagaccatcaatgaggaagctgcagaatgggatagattgcatccagtgcatgcagggcctattgcaccaggccagatgagagaaccaaggggaagtgacatagcaggaactactagtacccttcaggaacaaataggatggatgacacataatccacctatcccagtaggagaaatctataaaagatggataatcctgggattaaataaaatagtaagaatgtatagccctaccagcattctggacataagacaaggaccaaaggaaccctttagagactatgtagaccgattctataaaactctaagagccgagcaagcttcacaagaggtaaaaaattggatgacagaaaccttgttggtccaaaatgcgaacccagattgtaagactattttaaaagcattgggaccaggagcgacactagaagaaatgatgacagcatgtcagggagtggggggacccggccataaagcaagagttttggctgaagcaatgagccaagtaacaaatccagctaccataatgatacagaaaggcaattttaggaaccaaagaaagactgttaagtgtttcaattgtggcaaagaagggcacatagccaaaaattgcagggcccctaggaaaaagggctgttggaaatgtggaaaggaaggacaccaaatgaaagattgtactgagagacaggctaattttttagggaagatctggccttcccacaagggaaggccagggaattttcttcagagcagaccagagccaacagccccaccagaagagagcttcaggtttggggaagagacaacaactccctctcagaagcaggagccgatagacaaggaactgtatcctttagcttccctcagatcactctttggcagcgacccctcgtcacaataaagataggggggcaattaaaggaagctctattagatacaggagcagatgatacagtattagaagaaatgaatttgccaggaagatggaaaccaaaaatgatagggggaattggaggttttatcaaagtaagacagtatgatcagatactcatagaaatctgcggacataaagctataggtacagtattagtaggacctacacctgtcaacataattggaagaaatctgttgactcagattggctgcactttaaattttcccattagtcctattgagactgtaccagtaaaattaaagccaggaatggatggcccaaaagttaaacaatggccattgacagaagaaaaaataaaagcattagtagaaatttgtacagaaatggaaaaggaaggaaaaatttcaaaaattgggcctgaaaatccatacaatactccagtatttgccataaagaaaaaagacagtactaaatggagaaaattagtagatttcagagaacttaataagagaactcaagatttctgggaagttcaattaggaataccacatcctgcagggttaaaacagaaaaaatcagtaacagtactggatgtgggcgatgcatatttttcagttcccttagataaagacttcaggaagtatactgcatttaccatacctagtataaacaatgagacaccagggattagatatcagtacaatgtgcttccacagggatggaaaggatcaccagcaatattccagtgtagcatgacaaaaatcttagagccttttagaaaacaaaatccagacatagtcatctatcaatacatggatgatttgtatgtaggatctgacttagaaatagggcagcatagaacaaaaatagaggaactgagacaacatctgttgaggtggggatttaccacaccagacaaaaaacatcagaaagaacctccattcctttggatgggttatgaactccatcctgataaatggacagtacagcctatagtgctgccagaaaaggacagctggactgtcaatgacatacagaaattagtgggaaaattgaattgggcaagtcagatttatgcagggattaaagtaaggcaattatgtaaacttcttaggggaaccaaagcactaacagaagtagtaccactaacagaagaagcagagctagaactggcagaaaacagggagattctaaaagaaccggtacatggagtgtattatgacccatcaaaagacttaatagcagaaatacagaagcaggggcaaggccaatggacatatcaaatttatcaagagccatttaaaaatctgaaaacaggaaagtatgcaagaatgaacgaatctgccgttgccatatacagcatctgaacaagctgatcgaacccttcatggacggttaaggccgcctgttggtgggcggggatcaagcaggaatttggcattccctacaatccccaaagtcaaggagtaatagaatctatgaataaagaattaaagaaaattataggacaggtaagagatcaggctgaacatcttaagacagcagtacaaatggcagtattcatccacaattttaaaagaaaaggggggattggggggtacagtgcaggggaaagaatagtagacataatagcaacagacatacaaactaaagaattacaaaaacaaattacaaaaattcaaaattttcgggtttattacagggacagcagagatccagtttggaaaggaccagcaaagctcctctggaaaggtgaaggggcagtagtaatacaagataatagtgacataaaagtagtgccaagaagaaaagcaaagatcatcagggattatggaaaacagatggcaggtgatgattgtgtggctaatgcaacctataatagtagcaatagtagcattagtagtagcaataataatagcaatagttgtgtggtccatagtaatcatagaatataggaaaatattaagacaaagaaaaatagacaggttaattgatagactaatagaaagagcagaagacagtggcaatgagagtgaaggagaagtatcagcacttgtggagatgggggtggaaatggggcaccatgctccttgggatattgatgatctgtagtgctacagaaaaattgtgggtcacagtctattatggggtacctgtgtggaaggaagcaaccaccactctattttgtgcatcagatgctaaagcatatgatacagaggtacataatgtttgggccacacatgcctgtgtacccacagaccccaacccacaagaagtagtattggtaaatgtgacagaaaattttaacatgtggaaaaatgacatggtagaacagatgcatgaggatataatcagtttatgggatcaaagcctaaagccatgtgtaaaattaaccccactctgtgttagtttaaagtgcactgatttgaagaatgatactaataccaatagtagtagcgggagaatgataatggagaaaggagagataaaaaactgctctttcaatatcagcacaagcataagagataaggtgcagaaagaatatgcattcttttataaacttgatatagtaccaatagataataccagctataggttgataagttgtaacacctcagtcattacacaggcctgtccaaaggtatcctttgagccaattcccatacattattgtgccccggctggttttgcgattctaaaatgtaataataagacgttcaatggaacaggaccatgtacaaatgtcagcacagtacaatgtacacatggaatcaggccagtagtatcaactcaactgctgttaaatggcagtctagcagaagaagatgtagtaattagatctgccaatttcacagacaatgctaaaaccataatagtacagctgaacacatctgtagaaattaattgtacaagacccaacaacaatacaagaaaaagtatccgtatccagaggggaccagggagagcatttgttacaataggaaaaataggaaatatgagacaagcacattgtaacattagtagagcaaaatggaatgccactttaaaacagatagctagcaaattaagagaacaatttggaaataataaaacaataatctttaagcaatcctcaggaggggacccagaaattgtaacgcacagttttaattgtggaggggaatttttctactgtaattcaacacaactgtttaatagtacttggtttaatagtacttggagtactgaagggtcaaataacactgaaggaagtgacacaatcacactcccatgcagaataaaacaatttataaacatgtggcaggaagtaggaaaagcaatgtatgcccctcccatcagtggacaaattagatgttcatcaaatattactgggctgctattaacaagagatggtggtaataacaacaatgggtccgagatcttcagacctggaggaggcgatatgagggacaattggagaagtgaattatataaatataaagtagtaaaaattgaaccattaggagtagcacccaccaaggcaaagagaagagtggtgcagagagaaaaaagagcagtgggaataggagctttgttccttgggttcttgggagcagcaggaagcactatgggcgcagcgtcaatgacgctgacggtacaggccagacaattattgtctgatatagtgcagcagcagaacaatttgctgagggctattgaggcgcaacagcatctgttgcaactcacagtctggggcatcaaacagctccaggcaagaatcctggctgtggaaagatacctaaaggatcaacagctcctggggatttggggttgctctggaaaactcatttgcaccactgctgtgccttggaatgctagttggagtaataaatctctggaacagatttggaataacatgacctggatggagtgggacagagaaattaacaattacacaagcttaatacactccttaattgaagaatcgcaaaaccagcaagaaaagaatgaacaagaattattggaattagataaatgggcaagtttgtggaattggtttaacataacaaattggctgtggtatataaaattattcataatgatagtaggaggcttggtaggtttaagaatagtttttgctgtactttctatagtgaatagagttaggcagggatattcaccattatcgtttcagacccacctcccaatcccgaggggacccgacaggcccgaaggaatagaagaagaaggtggagagagagacagagacagatccattcgattagtgaacggatccttagcacttatctgggacgatctgcggagcctgtgcctcttcagctaccaccgcttgagagacttactcttgattgtaacgaggattgtggaacttctgggacgcagggggtgggaagccctcaaatattggtggaatctcctacagtattggagtcaggaactaaagaatagtgctgttaacttgctcaatgccacagccatagcagtagctgaggggacagatagggttatagaagtattacaagcagcttatagagctattcgccacatacctagaagaataagacagggcttggaaaggattttgctataagatgggtggcaagtggtcaaaaagtagtgtgattggatggcctgctgtaagggaaagaatgagacgagctgagccagcagcagatggggtgggagcagtatctcgagacctagaaaaacatggagcaatcacaagtagcaatacagcagctaacaatgctgcttgtgcctggctagaagcacaagaggaggaagaggtgggttttccagtcacacctcaggtacctttaagaccaatgacttacaaggcagctgtagatcttagccactttttaaaagaaaaggggggactggaagggctaattcactcccaaagaagacaagatatccttaccgtccatgaagggttcgatcgtaaagtgggatagttttttatggcaacggcagattcgttgagcctgcatggaatggatgaccctgagagagaagtgttagagtggaggtttgacagccgcctagcatttcatcacgtggcccgagagctgcatccggagtacttcaagaactgctgacatcgagcttgctacaagggactttccgctggggactttccagggaggcgtggcctgggcgggactggggagtggcgagccctcagatgctgcatataagcagctgctttttgcctgtactgggtctctctggttagaccagatctgagcctgggagctctctggctaactagggaacccactgcttaagcctcaataaagcttgccttgagtgcttcaagtagtgtgtgcccgtctgttgtgtgactctggtaactagagatccctcagacccttttagtcagtgtggaaaatctctagca

SEQ ID NO: 72 - DNA, 7759 bp, Artificial Sequence
  Synthetic Sequence
tggaagggctaatttggtcccaaaaaagacaagagatccttgatctgtggatctaccacacacaaggctacttccctgattggcagaactacacaccagggccagggatcagatatccactgacctttggatggtgcttcaagttagtaccagttgaaccagagcaagtagaagaggccaatgaaggagagaacaacagcttgttacaccctatgagccagcatgggatggaggacccggagggagaagtattagtgtggaagtttgacagcctcctagcatttcgtcacatggcccgagagctgcatccggagtactacaaagactgctgacatcgagctttctacaagggactttccgctggggactttccagggaggtgtggcctgggcgggactggggagtggcgagccctcagatgctacatataagcagctgctttttgcctgtactgggtctctctggttagaccagatctgagcctgggagctctctggctaactagggaacccactgcttaagcctcaataaagcttgccttgagtgctcaaagtagtgtgtgcccgtctgttgtgtgactctggtaactagagatccctcagacccttttagtcagtgtggaaaatctctagcagtggcgcccgaacagggacttgaaagcgaaagtaaagccagaggagatctctcgacgcaggactcggcttgctgaagcgcgcacggcaagaggcgaggggcggcgactggtgagtacgccaaaaattttgactagcggaggctagaaggagagagatgggtgcgagagcgtcggtattaagcgggggagaattagataaatgggaaaaaattcggttaaggccagggggaaagaaacaatataaactaaaacatatagtatgggcaagcagggagctagaacgattcgcagttaatcctggccttttagagacatcagaaggctgtagacaaatactgggacagctacaaccatcccttcagacaggatcagaagaacttagatcattatataatacaatagcagtcctctattgtgtgcatcaaaggatagatgtaaaagacaccaaggaagccttagataagatagaggaagagcaaaacaaaagtaagaaaaaggcacagcaagcagcagctgacacaggaaacaacagccaggtcagccaaaattaccctatagtgcagaacctccaggggcaaatggtacatcaggccatatcacctagaactttaaatgcatgggtaaaagtagtagaagagaaggctttcagcccagaagtaatacccatgttttcagcattatcagaaggagccaccccacaagatttaaataccatgctaaacacagtggggggacatcaagcagccatgcaaatgttaaaagagaccatcaatgaggaagctgcagaatgggatagattgcatccagtgcatgcagggcctattgcaccaggccagatgagagaaccaaggggaagtgacatagcaggaactactagtacccttcaggaacaaataggatggatgacacataatccacctatcccagtaggagaaatctataaaagatggataatcctgggattaaataaaatagtaagaatgtatagccctaccagcattctggacataagacaaggaccaaaggaaccctttagagactatgtagaccgattctataaaactctaagagccgagcaagcttcacaagaggtaaaaaattggatgacagaaaccttgttggtccaaaatgcgaacccagattgtaagactattttaaaagcattgggaccaggagcgacactagaagaaatgatgacagcatgtcagggagtggggggacccggccataaagcaagagttttggctgaagcaatgagccaagtaacaaatccagctaccataatgatacagaaaggcaattttaggaaccaaagaaagactgttaagtgtttcaattgtggcaaagaagggcacatagccaaaaattgcagggcccctaggaaaaagggctgttggaaatgtggaaaggaaggacaccaaatgaaagattgtactgagagacaggctaattttttagggaagatctggccttcccacaagggaaggccagggaattttcttcagagcagaccagagccaacagccccaccagaagagagcttcaggtttggggaagagacaacaactccctctcagaagcaggagccgatagacaaggaactgtatcctttagcttccctcagatcactctttggcagcgacccctcgtcacaataaagataggggggcaattaaaggaagctctattagatacaggagcagatgatacagtattagaagaaatgaatttgccaggaagatggaaaccaaaaatgatagggggaattggaggttttatcaaagtaagacagtatgatcagatactcatagaaatctgcggacataaagctataggtacagtattagtaggacctacacctgtcaacataattggaagaaatctgttgactcagattggctgcactttaaattttcccattagtcctattgagactgtaccagtaaaattaaagccaggaatggatggcccaaaagttaaacaatggccattgacagaagaaaaaataaaagcattagtagaaatttgtacagaaatggaaaaggaaggaaaaatttcaaaaattgggcctgaaaatccatacaatactccagtatttgccataaagaaaaaagacagtactaaatggagaaaattagtagatttcagagaacttaataagagaactcaagatttctgggaagttcaattaggaataccacatcctgcagggttaaaacagaaaaaatcagtaacagtactggatgtgggcgatgcatatttttcagttcccttagataaagacttcaggaagtatactgcatttaccatacctagtataaacaatgagacaccagggattagatatcagtacaatgtgcttccacagggatggaaaggatcaccagcaatattccagtgtagcatgacaaaaatcttagagccttttagaaaacaaaatccagacatagtcatctatcaatacatggatgatttgtatgtaggatctgacttagaaatagggcagcatagaacaaaaatagaggaactgagacaacatctgttgaggtggggatttaccacaccagacaaaaaacatcagaaagaacctccattcctttggatgggttatgaactccatcctgataaatggacagtacagcctatagtgctgccagaaaaggacagctggactgtcaatgacatacagaaattagtgggaaaattgaattgggcaagtcagatttatgcagggattaaagtaaggcaattatgtaaacttcttaggggaaccaaagcactaacagaagtagtaccactaacagaagaagcagagctagaactggcagaaaacagggagattctaaaagaaccggtacatggagtgtattatgacccatcaaaagacttaatagcagaaatacagaagcaggggcaaggccaatggacatatcaaatttatcaagagccatttaaaaatctgaaaacaggaaagtatgcaagaatgaacgaatctgccgttgccatatacagcatctgaacaagctgatcgaacccttcatggacggttaaggccgcctgttggtgggcggggatcaagcaggaatttggcattccctacaatccccaaagtcaaggagtaatagaatctatgaataaagaattaaagaaaattataggacaggtaagagatcaggctgaacatcttaagacagcagtacaaatggcagtattcatccacaattttaaaagaaaaggggggattggggggtacagtgcaggggaaagaatagtagacataatagcaacagacatacaaactaaagaattacaaaaacaaattacaaaaattcaaaattttcgggtttattacagggacagcagagatccagtttggaaaggaccagcaaagctcctctggaaaggtgaaggggcagtagtaatacaagataatagtgacataaaagtagtgccaagaagaaaagcaaagatcatcagggattatggaaaacagatggcaggtgatgattgtgtaccgtccatgaagggttcgatgatcggtcgtcgcagcggtctatggcaacggcagattcgttagacaaagaaaaatagacaggttaattgatagactaatagaaagagcagaagacagtggcaatgagagtgaaggagaagtatcagcacttgtggagatgggggtggaaatggggcaccatgctccttgggatattgatgatctgtagtgctacagaaaaattgtgggtcacagtctattatggggtacctgtgtggaaggaagcaaccaccactctattttgtgcatcagatgctaaagcatatgatacagaggtacataatgtttgggccacacatgcctgtgtacccacagaccccaacccacaagaagtagtattggtaaatgtgacagaaaattttaacatgtggaaaaatgacatggtagaacagatgcatgaggatataatcagtttatgggatcaaagcctaaagccatgtgtaaaattaaccccactctgtgttagtttaaagtgcactgatttgaagaatgatactaataccaatagtagtagcgggagaatgataatggagaaaggagagataaaaaactgctctttcaatatcagcacaagcataagagataaggtgcagaaagaatatgcattcttttataaacttgatatagtaccaatagataataccagctataggttgataagttgtaacacctcagtcattacacaggcctgtccaaaggtatcctttgagccaattcccatacattattgtgccccggctggttttgcgattctaaaatgtaataataagacgttcaatggaacaggaccatgtacaaatgtcagcacagtacaatgtacacatggaatcaggccagtagtatcaactcaactgctgttaaatggcagtctagcagaagaagatgtagtaattagatctgccaatttcacagacaatgctaaaaccataatagtacagctgaacacatctgtagaaattaattgtacaagacccaacaacaatacaagaaaaagtatccgtatccagaggggaccagggagagcatttgttacaataggaaaaataggaaatatgagacaagcacattgtaacattagtagagcaaaatggaatgccactttaaaacagatagctagcaaattaagagaacaatttggaaataataaaacaataatctttaagcaatcctcaggaggggacccagaaattgtaacgcacagttttaattgtggaggggaatttttctactgtaattcaacacaactgtttaatagtacttggtttaatagtacttggagtactgaagggtcaaataacactgaaggaagtgacacaatcacactcccatgcagaataaaacaatttataaacatgtggcaggaagtaggaaaagcaatgtatgcccctcccatcagtggacaaattagatgttcatcaaatattactgggctgctattaacaagagatggtggtaataacaacaatgggtccgagatcttcagacctggaggaggcgatatgagggacaattggagaagtgaattatataaatataaagtagtaaaaattgaaccattaggagtagcacccaccaaggcaaagagaagagtggtgcagagagaaaaaagagcagtgggaataggagctttgttccttgggttcttgggagcagcaggaagcactatgggcgcagcgtcaatgacgctgacggtacaggccagacaattattgtctgatatagtgcagcagcagaacaatttgctgagggctattgaggcgcaacagcatctgttgcaactcacagtctggggcatcaaacagctccaggcaagaatcctggctgtggaaagatacctaaaggatcaacagctcctggggatttggggttgctctggaaaactcatttgcaccactgctgtgccttggaatgctagttggagtaataaatctctggaacagatttggaataacatgacctggatggagtgggacagagaaattaacaattacacaagcttaatacactccttaattgaagaatcgcaaaaccagcaagaaaagaatgaacaagaattattggaattagataaatgggcaagtttgtggaattggtttaacataacaaattggctgtggtatataaaattattcataatgatagtaggaggcttggtaggtttaagaatagtttttgctgtactttctatagtgaatagagttaggcagggatattcaccattatcgtttcagacccacctcccaatcccgaggggacccgacaggcccgaaggaatagaagaagaaggtggagagagagacagagacagatccattcgattagtgaacggatccttagcacttatctgggacgatctgcggagcctgtgcctcttcagctaccaccgcttgagagacttactcttgattgtaacgaggattgtggaacttctgggacgcagggggtgggaagccctcaaatattggtggaatctcctacagtattggagtcaggaactaaagaatagtgctgttaacttgctcaatgccacagccatagcagtagctgaggggacagatagggttatagaagtattacaagcagcttatagagctattcgccacatacctagaagaataagacagggcttggaaaggattttgctataagatgggtggcaagtggtcaaaaagtagtgtgattggatggcctgctgtaagggaaagaatgagacgagctgagccagcagcagatggggtgggagcagtatctcgagacctagaaaaacatggagcaatcacaagtagcaatacagcagctaacaatgctgcttgtgcctggctagaagcacaagaggaggaagaggtgggttttccagtcacacctcaggtacctttaagaccaatgacttacaaggcagctgtagatcttagccactttttaaaagaaaaggggggactggaagggctaattcactcccaaagaagacaagatatccttgatctgtggatctaccacacacaaggctacttccctgattggcagaactacacaccagggccaggggtcagatatccactgacctttggatggtgctacaagctagtaccagttgagccagataaggtagaagaggccaataaaggagagaacaccagcttgttacaccctgtgagcctgcatggaatggatgaccctgagagagaagtgttagagtggaggtttgacagccgcctagcatttcatcacgtggcccgagagctgcatccggagtacttcaagaactgctgacatcgagcttgctacaagggactttccgctggggactttccagggaggcgtggcctgggcgggactggggagtggcgagccctcagatgctgcatataagcagctgctttttgcctgtactgggtctctctggttagaccagatctgagcctgggagctctctggctaactagggaacccactgcttaagcctcaataaagcttgccttgagtgcttcaagtagtgtgtgcccgtctgttgtgtgactctggtaactagagatccctcagacccttttagtcagtgtggaaaatctctagca

SEQ ID NO: 73 - DNA, 7648 bp, Artificial Sequence
  Synthetic Sequence
tggaagggctaatttggtcccaaaaaagacaagagatccttgatctgtggatctaccacacacaaggctacttccctgattggcagaactacacaccagggccagggatcagatatccactgacctttggatggtgcttcaagttagtaccagttgaaccagagcaagtagaagaggccaatgaaggagagaacaacagcttgttacaccctatgagccagcatgggatggaggacccggagggagaagtattagtgtggaagtttgacagcctcctagcatttcgtcacatggcccgagagctgcatccggagtactacaaagactgctgacatcgagctttctacaagggactttccgctggggactttccagggaggtgtggcctgggcgggactggggagtggcgagccctcagatgctacatataagcagctgctttttgcctgtactgggtctctctggttagaccagatctgagcctgggagctctctggctaactagggaacccactgcttaagcctcaataaagcttgccttgagtgctcaaagtagtgtgtgcccgtctgttgtgtgactctggtaactagagatccctcagacccttttagtcagtgtggaaaatctctagcagtggcgcccgaacagggacttgaaagcgaaagtaaagccagaggagatctctcgacgcaggactcggcttgctgaagcgcgcacggcaagaggcgaggggcggcgactggtgagtacgccaaaaattttgactagcggaggctagaaggagagagatgggtgcgagagcgtcggtattaagcgggggagaattagataaatgggaaaaaattcggttaaggccagggggaaagaaacaatataaactaaaacatatagtatgggcaagcagggagctagaacgattcgcagttaatcctggccttttagagacatcagaaggctgtagacaaatactgggacagctacaaccatcccttcagacaggatcagaagaacttagatcattatataatacaatagcagtcctctattgtgtgcatcaaaggatagatgtaaaagacaccaaggaagccttagataagatagaggaagagcaaaacaaaagtaagaaaaaggcacagcaagcagcagctgacacaggaaacaacagccaggtcagccaaaattaccctatagtgcagaacctccaggggcaaatggtacatcaggccatatcacctagaactttaaatgcatgggtaaaagtagtagaagagaaggctttcagcccagaagtaatacccatgttttcagcattatcagaaggagccaccccacaagatttaaataccatgctaaacacagtggggggacatcaagcagccatgcaaatgttaaaagagaccatcaatgaggaagctgcagaatgggatagattgcatccagtgcatgcagggcctattgcaccaggccagatgagagaaccaaggggaagtgacatagcaggaactactagtacccttcaggaacaaataggatggatgacacataatccacctatcccagtaggagaaatctataaaagatggataatcctgggattaaataaaatagtaagaatgtatagccctaccagcattctggacataagacaaggaccaaaggaaccctttagagactatgtagaccgattctataaaactctaagagccgagcaagcttcacaagaggtaaaaaattggatgacagaaaccttgttggtccaaaatgcgaacccagattgtaagactattttaaaagcattgggaccaggagcgacactagaagaaatgatgacagcatgtcagggagtggggggacccggccataaagcaagagttttggctgaagcaatgagccaagtaacaaatccagctaccataatgatacagaaaggcaattttaggaaccaaagaaagactgttaagtgtttcaattgtggcaaagaagggcacatagccaaaaattgcagggcccctaggaaaaagggctgttggaaatgtggaaaggaaggacaccaaatgaaagattgtactgagagacaggctaattttttagggaagatctggccttcccacaagggaaggccagggaattttcttcagagcagaccagagccaacagccccaccagaagagagcttcaggtttggggaagagacaacaactccctctcagaagcaggagccgatagacaaggaactgtatcctttagcttccctcagatcactctttggcagcgacccctcgtcacaataaagataggggggcaattaaaggaagctctattagatacaggagcagatgatacagtattagaagaaatgaatttgccaggaagatggaaaccaaaaatgatagggggaattggaggttttatcaaagtaagacagtatgatcagatactcatagaaatctgcggacataaagctataggtacagtattagtaggacctacacctgtcaacataattggaagaaatctgttgactcagattggctgcactttaaattttcccattagtcctattgagactgtaccagtaaaattaaagccaggaatggatggcccaaaagttaaacaatggccattgacagaagaaaaaataaaagcattagtagaaatttgtacagaaatggaaaaggaaggaaaaatttcaaaaattgggcctgaaaatccatacaatactccagtatttgccataaagaaaaaagacagtactaaatggagaaaattagtagatttcagagaacttaataagagaactcaagatttctgggaagttcaattaggaataccacatcctgcagggttaaaacagaaaaaatcagtaacagtactggatgtgggcgatgcatatttttcagttcccttagataaagacttcaggaagtatactgcatttaccatacctagtataaacaatgagacaccagggattagatatcagtacaatgtgcttccacagggatggaaaggatcaccagcaatattccagtgtagcatgacaaaaatcttagagccttttagaaaacaaaatccagacatagtcatctatcaatacatggatgatttgtatgtaggatctgacttagaaatagggcagcatagaacaaaaatagaggaactgagacaacatctgttgaggtggggatttaccacaccagacaaaaaacatcagaaagaacctccattcctttggatgggttatgaactccatcctgataaatggacagtacagcctatagtgctgccagaaaaggacagctggactgtcaatgacatacagaaattagtgggaaaattgaattgggcaagtcagatttatgcagggattaaagtaaggcaattatgtaaacttcttaggggaaccaaagcactaacagaagtagtaccactaacagaagaagcagagctagaactggcagaaaacagggagattctaaaagaaccggtacatggagtgtattatgacccatcaaaagacttaatagcagaaatacagaagcaggggcaaggccaatggacatatcaaatttatcaagagccatttaaaaatctgaaaacaggaaagtatgcaagaatgaacgaatctgccgttgccatatacagcatctgaacaagctgatcgaacccttcatggacggttaaggccgcctgttggtgggcggggatcaagcaggaatttggcattccctacaatccccaaagtcaaggagtaatagaatctatgaataaagaattaaagaaaattataggacaggtaagagatcaggctgaacatcttaagacagcagtacaaatggcagtattcatccacaattttaaaagaaaaggggggattggggggtacagtgcaggggaaagaatagtagacataatagcaacagacatacaaactaaagaattacaaaaacaaattacaaaaattcaaaattttcgggtttattacagggacagcagagatccagtttggaaaggaccagcaaagctcctctggaaaggtgaaggggcagtagtaatacaagataatagtgacataaaagtagtgccaagaagaaaagcaaagatcatcagggattatggaaaacagatggcaggtgatgattgtgtaccgtccatgaagggttcgatgatcggtcgtcgcagcggtctatggcaacggcagattcgttagacaaagaaaaatagacaggttaattgatagactaatagaaagagcagaagacagtggcaatgagagtgaaggagaagtatcagcacttgtggagatgggggtggaaatggggcaccatgctccttgggatattgatgatctgtagtgctacagaaaaattgtgggtcacagtctattatggggtacctgtgtggaaggaagcaaccaccactctattttgtgcatcagatgctaaagcatatgatacagaggtacataatgtttgggccacacatgcctgtgtacccacagaccccaacccacaagaagtagtattggtaaatgtgacagaaaattttaacatgtggaaaaatgacatggtagaacagatgcatgaggatataatcagtttatgggatcaaagcctaaagccatgtgtaaaattaaccccactctgtgttagtttaaagtgcactgatttgaagaatgatactaataccaatagtagtagcgggagaatgataatggagaaaggagagataaaaaactgctctttcaatatcagcacaagcataagagataaggtgcagaaagaatatgcattcttttataaacttgatatagtaccaatagataataccagctataggttgataagttgtaacacctcagtcattacacaggcctgtccaaaggtatcctttgagccaattcccatacattattgtgccccggctggttttgcgattctaaaatgtaataataagacgttcaatggaacaggaccatgtacaaatgtcagcacagtacaatgtacacatggaatcaggccagtagtatcaactcaactgctgttaaatggcagtctagcagaagaagatgtagtaattagatctgccaatttcacagacaatgctaaaaccataatagtacagctgaacacatctgtagaaattaattgtacaagacccaacaacaatacaagaaaaagtatccgtatccagaggggaccagggagagcatttgttacaataggaaaaataggaaatatgagacaagcacattgtaacattagtagagcaaaatggaatgccactttaaaacagatagctagcaaattaagagaacaatttggaaataataaaacaataatctttaagcaatcctcaggaggggacccagaaattgtaacgcacagttttaattgtggaggggaatttttctactgtaattcaacacaactgtttaatagtacttggtttaatagtacttggagtactgaagggtcaaataacactgaaggaagtgacacaatcacactcccatgcagaataaaacaatttataaacatgtggcaggaagtaggaaaagcaatgtatgcccctcccatcagtggacaaattagatgttcatcaaatattactgggctgctattaacaagagatggtggtaataacaacaatgggtccgagatcttcagacctggaggaggcgatatgagggacaattggagaagtgaattatataaatataaagtagtaaaaattgaaccattaggagtagcacccaccaaggcaaagagaagagtggtgcagagagaaaaaagagcagtgggaataggagctttgttccttgggttcttgggagcagcaggaagcactatgggcgcagcgtcaatgacgctgacggtacaggccagacaattattgtctgatatagtgcagcagcagaacaatttgctgagggctattgaggcgcaacagcatctgttgcaactcacagtctggggcatcaaacagctccaggcaagaatcctggctgtggaaagatacctaaaggatcaacagctcctggggatttggggttgctctggaaaactcatttgcaccactgctgtgccttggaatgctagttggagtaataaatctctggaacagatttggaataacatgacctggatggagtgggacagagaaattaacaattacacaagcttaatacactccttaattgaagaatcgcaaaaccagcaagaaaagaatgaacaagaattattggaattagataaatgggcaagtttgtggaattggtttaacataacaaattggctgtggtatataaaattattcataatgatagtaggaggcttggtaggtttaagaatagtttttgctgtactttctatagtgaatagagttaggcagggatattcaccattatcgtttcagacccacctcccaatcccgaggggacccgacaggcccgaaggaatagaagaagaaggtggagagagagacagagacagatccattcgattagtgaacggatccttagcacttatctgggacgatctgcggagcctgtgcctcttcagctaccaccgcttgagagacttactcttgattgtaacgaggattgtggaacttctgggacgcagggggtgggaagccctcaaatattggtggaatctcctacagtattggagtcaggaactaaagaatagtgctgttaacttgctcaatgccacagccatagcagtagctgaggggacagatagggttatagaagtattacaagcagcttatagagctattcgccacatacctagaagaataagacagggcttggaaaggattttgctataagatgggtggcaagtggtcaaaaagtagtgtgattggatggcctgctgtaagggaaagaatgagacgagctgagccagcagcagatggggtgggagcagtatctcgagacctagaaaaacatggagcaatcacaagtagcaatacagcagctaacaatgctgcttgtgcctggctagaagcacaagaggaggaagaggtgggttttccagtcacacctcaggtacctttaagaccaatgacttacaaggcagctgtagatcttagccactttttaaaagaaaaggggggactggaagggctaattcactcccaaagaagacaagatatccttaccgtccatgaagggttcgatcgtaaagtgggatagttttttatggcaacggcagattcgttgagcctgcatggaatggatgaccctgagagagaagtgttagagtggaggtttgacagccgcctagcatttcatcacgtggcccgagagctgcatccggagtacttcaagaactgctgacatcgagcttgctacaagggactttccgctggggactttccagggaggcgtggcctgggcgggactggggagtggcgagccctcagatgctgcatataagcagctgctttttgcctgtactgggtctctctggttagaccagatctgagcctgggagctctctggctaactagggaacccactgcttaagcctcaataaagcttgccttgagtgcttcaagtagtgtgtgcccgtctgttgtgtgactctggtaactagagatccctcagacccttttagtcagtgtggaaaatctctagca

SEQ ID NO: 74 - DNA, 7637 bp, Artificial Sequence
  Synthetic Sequence
tggaagggctaatttggtcccaaaaaagacaagagatccttgatctgtggatctaccacacacaaggctacttccctgattggcagaactacacaccagggccagggatcagatatccactgacctttggatggtgcttcaagttagtaccagttgaaccagagcaagtagaagaggccaatgaaggagagaacaacagcttgttacaccctatgagccagcatgggatggaggacccggagggagaagtattagtgtggaagtttgacagcctcctagcatttcgtcacatggcccgagagctgcatccggagtactacaaagactgctgacatcgagctttctacaagggactttccgctggggactttccagggaggtgtggcctgggcgggactggggagtggcgagccctcagatgctacatataagcagctgctttttgcctgtactgggtctctctggttagaccagatctgagcctgggagctctctggctaactagggaacccactgcttaagcctcaataaagcttgccttgagtgctcaaagtagtgtgtgcccgtctgttgtgtgactctggtaactagagatccctcagacccttttagtcagtgtggaaaatctctagcagtggcgcccgaacagggacttgaaagcgaaagtaaagccagaggagatctctcgacgcaggactcggcttgctgaagcgcgcacggcaagaggcgaggggcggcgactggtgagtacgccaaaaattttgactagcggaggctagaaggagagagatgggtgcgagagcgtcggtattaagcgggggagaattagataaatgggaaaaaattcggttaaggccagggggaaagaaacaatataaactaaaacatatagtatgggcaagcagggagctagaacgattcgcagttaatcctggccttttagagacatcagaaggctgtagacaaatactgggacagctacaaccatcccttcagacaggatcagaagaacttagatcattatataatacaatagcagtcctctattgtgtgcatcaaaggatagatgtaaaagacaccaaggaagccttagataagatagaggaagagcaaaacaaaagtaagaaaaaggcacagcaagcagcagctgacacaggaaacaacagccaggtcagccaaaattaccctatagtgcagaacctccaggggcaaatggtacatcaggccatatcacctagaactttaaatgcatgggtaaaagtagtagaagagaaggctttcagcccagaagtaatacccatgttttcagcattatcagaaggagccaccccacaagatttaaataccatgctaaacacagtggggggacatcaagcagccatgcaaatgttaaaagagaccatcaatgaggaagctgcagaatgggatagattgcatccagtgcatgcagggcctattgcaccaggccagatgagagaaccaaggggaagtgacatagcaggaactactagtacccttcaggaacaaataggatggatgacacataatccacctatcccagtaggagaaatctataaaagatggataatcctgggattaaataaaatagtaagaatgtatagccctaccagcattctggacataagacaaggaccaaaggaaccctttagagactatgtagaccgattctataaaactctaagagccgagcaagcttcacaagaggtaaaaaattggatgacagaaaccttgttggtccaaaatgcgaacccagattgtaagactattttaaaagcattgggaccaggagcgacactagaagaaatgatgacagcatgtcagggagtggggggacccggccataaagcaagagttttggctgaagcaatgagccaagtaacaaatccagctaccataatgatacagaaaggcaattttaggaaccaaagaaagactgttaagtgtttcaattgtggcaaagaagggcacatagccaaaaattgcagggcccctaggaaaaagggctgttggaaatgtggaaaggaaggacaccaaatgaaagattgtactgagagacaggctaattttttagggaagatctggccttcccacaagggaaggccagggaattttcttcagagcagaccagagccaacagccccaccagaagagagcttcaggtttggggaagagacaacaactccctctcagaagcaggagccgatagacaaggaactgtatcctttagcttccctcagatcactctttggcagcgacccctcgtcacaataaagataggggggcaattaaaggaagctctattagatacaggagcagatgatacagtattagaagaaatgaatttgccaggaagatggaaaccaaaaatgatagggggaattggaggttttatcaaagtaagacagtatgatcagatactcatagaaatctgcggacataaagctataggtacagtattagtaggacctacacctgtcaacataattggaagaaatctgttgactcagattggctgcactttaaattttcccattagtcctattgagactgtaccagtaaaattaaagccaggaatggatggcccaaaagttaaacaatggccattgacagaagaaaaaataaaagcattagtagaaatttgtacagaaatggaaaaggaaggaaaaatttcaaaaattgggcctgaaaatccatacaatactccagtatttgccataaagaaaaaagacagtactaaatggagaaaattagtagatttcagagaacttaataagagaactcaagatttctgggaagttcaattaggaataccacatcctgcagggttaaaacagaaaaaatcagtaacagtactggatgtgggcgatgcatatttttcagttcccttagataaagacttcaggaagtatactgcatttaccatacctagtataaacaatgagacaccagggattagatatcagtacaatgtgcttccacagggatggaaaggatcaccagcaatattccagtgtagcatgacaaaaatcttagagccttttagaaaacaaaatccagacatagtcatctatcaatacatggatgatttgtatgtaggatctgacttagaaatagggcagcatagaacaaaaatagaggaactgagacaacatctgttgaggtggggatttaccacaccagacaaaaaacatcagaaagaacctccattcctttggatgggttatgaactccatcctgataaatggacagtacagcctatagtgctgccagaaaaggacagctggactgtcaatgacatacagaaattagtgggaaaattgaattgggcaagtcagatttatgcagggattaaagtaaggcaattatgtaaacttcttaggggaaccaaagcactaacagaagtagtaccactaacagaagaagcagagctagaactggcagaaaacagggagattctaaaagaaccggtacatggagtgtattatgacccatcaaaagacttaatagcagaaatacagaagcaggggcaaggccaatggacatatcaaatttatcaagagccatttaaaaatctgaaaacaggaaagtatgcaagaatgaacgaatctgccgttgccatatacagcatctgaacaagctgatcgaacccttcatggacggttaaggccgcctgttggtgggcggggatcaagcaggaatttggcattccctacaatccccaaagtcaaggagtaatagaatctatgaataaagaattaaagaaaattataggacaggtaagagatcaggctgaacatcttaagacagcagtacaaatggcagtattcatccacaattttaaaagaaaaggggggattggggggtacagtgcaggggaaagaatagtagacataatagcaacagacatacaaactaaagaattacaaaaacaaattacaaaaattcaaaattttcgggtttattacagggacagcagagatccagtttggaaaggaccagcaaagctcctctggaaaggtgaaggggcagtagtaatacaagataatagtgacataaaagtagtgccaagaagaaaagcaaagatcatcagggattaaccgtccatgaagggttcgattatctgtagccaacattcgatatggcaacggcagattcgttggagatgggggtggaaatggggcaccatgctccttgggatattgatgatctgtagtgctacagaaaaattgtgggtcacagtctattatggggtacctgtgtggaaggaagcaaccaccactctattttgtgcatcagatgctaaagcatatgatacagaggtacataatgtttgggccacacatgcctgtgtacccacagaccccaacccacaagaagtagtattggtaaatgtgacagaaaattttaacatgtggaaaaatgacatggtagaacagatgcatgaggatataatcagtttatgggatcaaagcctaaagccatgtgtaaaattaaccccactctgtgttagtttaaagtgcactgatttgaagaatgatactaataccaatagtagtagcgggagaatgataatggagaaaggagagataaaaaactgctctttcaatatcagcacaagcataagagataaggtgcagaaagaatatgcattcttttataaacttgatatagtaccaatagataataccagctataggttgataagttgtaacacctcagtcattacacaggcctgtccaaaggtatcctttgagccaattcccatacattattgtgccccggctggttttgcgattctaaaatgtaataataagacgttcaatggaacaggaccatgtacaaatgtcagcacagtacaatgtacacatggaatcaggccagtagtatcaactcaactgctgttaaatggcagtctagcagaagaagatgtagtaattagatctgccaatttcacagacaatgctaaaaccataatagtacagctgaacacatctgtagaaattaattgtacaagacccaacaacaatacaagaaaaagtatccgtatccagaggggaccagggagagcatttgttacaataggaaaaataggaaatatgagacaagcacattgtaacattagtagagcaaaatggaatgccactttaaaacagatagctagcaaattaagagaacaatttggaaataataaaacaataatctttaagcaatcctcaggaggggacccagaaattgtaacgcacagttttaattgtggaggggaatttttctactgtaattcaacacaactgtttaatagtacttggtttaatagtacttggagtactgaagggtcaaataacactgaaggaagtgacacaatcacactcccatgcagaataaaacaatttataaacatgtggcaggaagtaggaaaagcaatgtatgcccctcccatcagtggacaaattagatgttcatcaaatattactgggctgctattaacaagagatggtggtaataacaacaatgggtccgagatcttcagacctggaggaggcgatatgagggacaattggagaagtgaattatataaatataaagtagtaaaaattgaaccattaggagtagcacccaccaaggcaaagagaagagtggtgcagagagaaaaaagagcagtgggaataggagctttgttccttgggttcttgggagcagcaggaagcactatgggcgcagcgtcaatgacgctgacggtacaggccagacaattattgtctgatatagtgcagcagcagaacaatttgctgagggctattgaggcgcaacagcatctgttgcaactcacagtctggggcatcaaacagctccaggcaagaatcctggctgtggaaagatacctaaaggatcaacagctcctggggatttggggttgctctggaaaactcatttgcaccactgctgtgccttggaatgctagttggagtaataaatctctggaacagatttggaataacatgacctggatggagtgggacagagaaattaacaattacacaagcttaatacactccttaattgaagaatcgcaaaaccagcaagaaaagaatgaacaagaattattggaattagataaatgggcaagtttgtggaattggtttaacataacaaattggctgtggtatataaaattattcataatgatagtaggaggcttggtaggtttaagaatagtttttgctgtactttctatagtgaatagagttaggcagggatattcaccattatcgtttcagacccacctcccaatcccgaggggacccgacaggcccgaaggaatagaagaagaaggtggagagagagacagagacagatccattcgattagtgaacggatccttagcacttatctgggacgatctgcggagcctgtgcctcttcagctaccaccgcttgagagacttactcttgattgtaacgaggattgtggaacttctgggacgcagggggtgggaagccctcaaatattggtggaatctcctacagtattggagtcaggaactaaagaatagtgctgttaacttgctcaatgccacagccatagcagtagctgaggggacagatagggttatagaagtattacaagcagcttatagagctattcgccacatacctagaagaataagacagggcttggaaaggattttgctataagatgggtggcaagtggtcaaaaagtagtgtgattggatggcctgctgtaagggaaagaatgagacgagctgagccagcagcagatggggtgggagcagtatctcgagacctagaaaaacatggagcaatcacaagtagcaatacagcagctaacaatgctgcttgtgcctggctagaagcacaagaggaggaagaggtgggttttccagtcacacctcaggtacctttaagaccaatgacttacaaggcagctgtagatcttagccactttttaaaagaaaaggggggactggaagggctaattcactcccaaagaagacaagatatccttgatctgtggatctaccacacacaaggctacttccctgattggcagaactacacaccagggccaggggtcagatatccactgacctttggatggtgctacaagctagtaccagttgagccagataaggtagaagaggccaataaaggagagaacaccagcttgttacaccctgtgagcctgcatggaatggatgaccctgagagagaagtgttagagtggaggtttgacagccgcctagcatttcatcacgtggcccgagagctgcatccggagtacttcaagaactgctgacatcgagcttgctacaagggactttccgctggggactttccagggaggcgtggcctgggcgggactggggagtggcgagccctcagatgctgcatataagcagctgctttttgcctgtactgggtctctctggttagaccagatctgagcctgggagctctctggctaactagggaacccactgcttaagcctcaataaagcttgccttgagtgcttcaagtagtgtgtgcccgtctgttgtgtgactctggtaactagagatccctcagacccttttagtcagtgtggaaaatctctagca

SEQ ID NO: 75 - DNA, 7526 bp, Artificial Sequence
  Synthetic Sequence
tggaagggctaatttggtcccaaaaaagacaagagatccttgatctgtggatctaccacacacaaggctacttccctgattggcagaactacacaccagggccagggatcagatatccactgacctttggatggtgcttcaagttagtaccagttgaaccagagcaagtagaagaggccaatgaaggagagaacaacagcttgttacaccctatgagccagcatgggatggaggacccggagggagaagtattagtgtggaagtttgacagcctcctagcatttcgtcacatggcccgagagctgcatccggagtactacaaagactgctgacatcgagctttctacaagggactttccgctggggactttccagggaggtgtggcctgggcgggactggggagtggcgagccctcagatgctacatataagcagctgctttttgcctgtactgggtctctctggttagaccagatctgagcctgggagctctctggctaactagggaacccactgcttaagcctcaataaagcttgccttgagtgctcaaagtagtgtgtgcccgtctgttgtgtgactctggtaactagagatccctcagacccttttagtcagtgtggaaaatctctagcagtggcgcccgaacagggacttgaaagcgaaagtaaagccagaggagatctctcgacgcaggactcggcttgctgaagcgcgcacggcaagaggcgaggggcggcgactggtgagtacgccaaaaattttgactagcggaggctagaaggagagagatgggtgcgagagcgtcggtattaagcgggggagaattagataaatgggaaaaaattcggttaaggccagggggaaagaaacaatataaactaaaacatatagtatgggcaagcagggagctagaacgattcgcagttaatcctggccttttagagacatcagaaggctgtagacaaatactgggacagctacaaccatcccttcagacaggatcagaagaacttagatcattatataatacaatagcagtcctctattgtgtgcatcaaaggatagatgtaaaagacaccaaggaagccttagataagatagaggaagagcaaaacaaaagtaagaaaaaggcacagcaagcagcagctgacacaggaaacaacagccaggtcagccaaaattaccctatagtgcagaacctccaggggcaaatggtacatcaggccatatcacctagaactttaaatgcatgggtaaaagtagtagaagagaaggctttcagcccagaagtaatacccatgttttcagcattatcagaaggagccaccccacaagatttaaataccatgctaaacacagtggggggacatcaagcagccatgcaaatgttaaaagagaccatcaatgaggaagctgcagaatgggatagattgcatccagtgcatgcagggcctattgcaccaggccagatgagagaaccaaggggaagtgacatagcaggaactactagtacccttcaggaacaaataggatggatgacacataatccacctatcccagtaggagaaatctataaaagatggataatcctgggattaaataaaatagtaagaatgtatagccctaccagcattctggacataagacaaggaccaaaggaaccctttagagactatgtagaccgattctataaaactctaagagccgagcaagcttcacaagaggtaaaaaattggatgacagaaaccttgttggtccaaaatgcgaacccagattgtaagactattttaaaagcattgggaccaggagcgacactagaagaaatgatgacagcatgtcagggagtggggggacccggccataaagcaagagttttggctgaagcaatgagccaagtaacaaatccagctaccataatgatacagaaaggcaattttaggaaccaaagaaagactgttaagtgtttcaattgtggcaaagaagggcacatagccaaaaattgcagggcccctaggaaaaagggctgttggaaatgtggaaaggaaggacaccaaatgaaagattgtactgagagacaggctaattttttagggaagatctggccttcccacaagggaaggccagggaattttcttcagagcagaccagagccaacagccccaccagaagagagcttcaggtttggggaagagacaacaactccctctcagaagcaggagccgatagacaaggaactgtatcctttagcttccctcagatcactctttggcagcgacccctcgtcacaataaagataggggggcaattaaaggaagctctattagatacaggagcagatgatacagtattagaagaaatgaatttgccaggaagatggaaaccaaaaatgatagggggaattggaggttttatcaaagtaagacagtatgatcagatactcatagaaatctgcggacataaagctataggtacagtattagtaggacctacacctgtcaacataattggaagaaatctgttgactcagattggctgcactttaaattttcccattagtcctattgagactgtaccagtaaaattaaagccaggaatggatggcccaaaagttaaacaatggccattgacagaagaaaaaataaaagcattagtagaaatttgtacagaaatggaaaaggaaggaaaaatttcaaaaattgggcctgaaaatccatacaatactccagtatttgccataaagaaaaaagacagtactaaatggagaaaattagtagatttcagagaacttaataagagaactcaagatttctgggaagttcaattaggaataccacatcctgcagggttaaaacagaaaaaatcagtaacagtactggatgtgggcgatgcatatttttcagttcccttagataaagacttcaggaagtatactgcatttaccatacctagtataaacaatgagacaccagggattagatatcagtacaatgtgcttccacagggatggaaaggatcaccagcaatattccagtgtagcatgacaaaaatcttagagccttttagaaaacaaaatccagacatagtcatctatcaatacatggatgatttgtatgtaggatctgacttagaaatagggcagcatagaacaaaaatagaggaactgagacaacatctgttgaggtggggatttaccacaccagacaaaaaacatcagaaagaacctccattcctttggatgggttatgaactccatcctgataaatggacagtacagcctatagtgctgccagaaaaggacagctggactgtcaatgacatacagaaattagtgggaaaattgaattgggcaagtcagatttatgcagggattaaagtaaggcaattatgtaaacttcttaggggaaccaaagcactaacagaagtagtaccactaacagaagaagcagagctagaactggcagaaaacagggagattctaaaagaaccggtacatggagtgtattatgacccatcaaaagacttaatagcagaaatacagaagcaggggcaaggccaatggacatatcaaatttatcaagagccatttaaaaatctgaaaacaggaaagtatgcaagaatgaacgaatctgccgttgccatatacagcatctgaacaagctgatcgaacccttcatggacggttaaggccgcctgttggtgggcggggatcaagcaggaatttggcattccctacaatccccaaagtcaaggagtaatagaatctatgaataaagaattaaagaaaattataggacaggtaagagatcaggctgaacatcttaagacagcagtacaaatggcagtattcatccacaattttaaaagaaaaggggggattggggggtacagtgcaggggaaagaatagtagacataatagcaacagacatacaaactaaagaattacaaaaacaaattacaaaaattcaaaattttcgggtttattacagggacagcagagatccagtttggaaaggaccagcaaagctcctctggaaaggtgaaggggcagtagtaatacaagataatagtgacataaaagtagtgccaagaagaaaagcaaagatcatcagggattaaccgtccatgaagggttcgattatctgtagccaacattcgatatggcaacggcagattcgttggagatgggggtggaaatggggcaccatgctccttgggatattgatgatctgtagtgctacagaaaaattgtgggtcacagtctattatggggtacctgtgtggaaggaagcaaccaccactctattttgtgcatcagatgctaaagcatatgatacagaggtacataatgtttgggccacacatgcctgtgtacccacagaccccaacccacaagaagtagtattggtaaatgtgacagaaaattttaacatgtggaaaaatgacatggtagaacagatgcatgaggatataatcagtttatgggatcaaagcctaaagccatgtgtaaaattaaccccactctgtgttagtttaaagtgcactgatttgaagaatgatactaataccaatagtagtagcgggagaatgataatggagaaaggagagataaaaaactgctctttcaatatcagcacaagcataagagataaggtgcagaaagaatatgcattcttttataaacttgatatagtaccaatagataataccagctataggttgataagttgtaacacctcagtcattacacaggcctgtccaaaggtatcctttgagccaattcccatacattattgtgccccggctggttttgcgattctaaaatgtaataataagacgttcaatggaacaggaccatgtacaaatgtcagcacagtacaatgtacacatggaatcaggccagtagtatcaactcaactgctgttaaatggcagtctagcagaagaagatgtagtaattagatctgccaatttcacagacaatgctaaaaccataatagtacagctgaacacatctgtagaaattaattgtacaagacccaacaacaatacaagaaaaagtatccgtatccagaggggaccagggagagcatttgttacaataggaaaaataggaaatatgagacaagcacattgtaacattagtagagcaaaatggaatgccactttaaaacagatagctagcaaattaagagaacaatttggaaataataaaacaataatctttaagcaatcctcaggaggggacccagaaattgtaacgcacagttttaattgtggaggggaatttttctactgtaattcaacacaactgtttaatagtacttggtttaatagtacttggagtactgaagggtcaaataacactgaaggaagtgacacaatcacactcccatgcagaataaaacaatttataaacatgtggcaggaagtaggaaaagcaatgtatgcccctcccatcagtggacaaattagatgttcatcaaatattactgggctgctattaacaagagatggtggtaataacaacaatgggtccgagatcttcagacctggaggaggcgatatgagggacaattggagaagtgaattatataaatataaagtagtaaaaattgaaccattaggagtagcacccaccaaggcaaagagaagagtggtgcagagagaaaaaagagcagtgggaataggagctttgttccttgggttcttgggagcagcaggaagcactatgggcgcagcgtcaatgacgctgacggtacaggccagacaattattgtctgatatagtgcagcagcagaacaatttgctgagggctattgaggcgcaacagcatctgttgcaactcacagtctggggcatcaaacagctccaggcaagaatcctggctgtggaaagatacctaaaggatcaacagctcctggggatttggggttgctctggaaaactcatttgcaccactgctgtgccttggaatgctagttggagtaataaatctctggaacagatttggaataacatgacctggatggagtgggacagagaaattaacaattacacaagcttaatacactccttaattgaagaatcgcaaaaccagcaagaaaagaatgaacaagaattattggaattagataaatgggcaagtttgtggaattggtttaacataacaaattggctgtggtatataaaattattcataatgatagtaggaggcttggtaggtttaagaatagtttttgctgtactttctatagtgaatagagttaggcagggatattcaccattatcgtttcagacccacctcccaatcccgaggggacccgacaggcccgaaggaatagaagaagaaggtggagagagagacagagacagatccattcgattagtgaacggatccttagcacttatctgggacgatctgcggagcctgtgcctcttcagctaccaccgcttgagagacttactcttgattgtaacgaggattgtggaacttctgggacgcagggggtgggaagccctcaaatattggtggaatctcctacagtattggagtcaggaactaaagaatagtgctgttaacttgctcaatgccacagccatagcagtagctgaggggacagatagggttatagaagtattacaagcagcttatagagctattcgccacatacctagaagaataagacagggcttggaaaggattttgctataagatgggtggcaagtggtcaaaaagtagtgtgattggatggcctgctgtaagggaaagaatgagacgagctgagccagcagcagatggggtgggagcagtatctcgagacctagaaaaacatggagcaatcacaagtagcaatacagcagctaacaatgctgcttgtgcctggctagaagcacaagaggaggaagaggtgggttttccagtcacacctcaggtacctttaagaccaatgacttacaaggcagctgtagatcttagccactttttaaaagaaaaggggggactggaagggctaattcactcccaaagaagacaagatatccttaccgtccatgaagggttcgatcgtaaagtgggatagttttttatggcaacggcagattcgttgagcctgcatggaatggatgaccctgagagagaagtgttagagtggaggtttgacagccgcctagcatttcatcacgtggcccgagagctgcatccggagtacttcaagaactgctgacatcgagcttgctacaagggactttccgctggggactttccagggaggcgtggcctgggcgggactggggagtggcgagccctcagatgctgcatataagcagctgctttttgcctgtactgggtctctctggttagaccagatctgagcctgggagctctctggctaactagggaacccactgcttaagcctcaataaagcttgccttgagtgcttcaagtagtgtgtgcccgtctgttgtgtgactctggtaactagagatccctcagacccttttagtcagtgtggaaaatctctagca

SEQ ID NO: 76 - DNA, 8756 bp, Artificial Sequence
  Synthetic Sequence
tggaagggctaatttggtcccaaaaaagacaagagatccttgatctgtggatctaccacacacaaggctacttccctgattggcagaactacacaccagggccagggatcagatatccactgacctttggatggtgcttcaagttagtaccagttgaaccagagcaagtagaagaggccaatgaaggagagaacaacagcttgttacaccctatgagccagcatgggatggaggacccggagggagaagtattagtgtggaagtttgacagcctcctagcatttcgtcacatggcccgagagctgcatccggagtactacaaagactgctgacatcgagctttctacaagggactttccgctggggactttccagggaggtgtggcctgggcgggactggggagtggcgagccctcagatgctacatataagcagctgctttttgcctgtactgggtctctctggttagaccagatctgagcctgggagctctctggctaactagggaacccactgcttaagcctcaataaagcttgccttgagtgctcaaagtagtgtgtgcccgtctgttgtgtgactctggtaactagagatccctcagacccttttagtcagtgtggaaaatctctagcagtggcgcccgaacagggacttgaaagcgaaagtaaagccagaggagatctctcgacgcaggactcggcttgctgaagcgcgcacggcaagaggcgaggggcggcgactggtgagtacgccaaaaattttgactagcggaggctagaaggagagagatgggtgcgagagcgtcggtattaagcgggggagaattagataaatgggaaaaaattcggttaaggccagggggaaagaaacaatataaactaaaacatatagtatgggcaagcagggagctagaacgattcgcagttaatcctggccttttagagacatcagaaggctgtagacaaatactgggacagctacaaccatcccttcagacaggatcagaagaacttagatcattatataatacaatagcagtcctctattgtgtgcatcaaaggatagatgtaaaagacaccaaggaagccttagataagatagaggaagagcaaaacaaaagtaagaaaaaggcacagcaagcagcagctgacacaggaaacaacagccaggtcagccaaaattaccctatagtgcagaacctccaggggcaaatggtacatcaggccatatcacctagaactttaaatgcatgggtaaaagtagtagaagagaaggctttcagcccagaagtaatacccatgttttcagcattatcagaaggagccaccccacaagatttaaataccatgctaaacacagtggggggacatcaagcagccatgcaaatgttaaaagagaccatcaatgaggaagctgcagaatgggatagattgcatccagtgcatgcagggcctattgcaccaggccagatgagagaaccaaggggaagtgacatagcaggaactactagtacccttcaggaacaaataggatggatgacacataatccacctatcccagtaggagaaatctataaaagatggataatcctgggattaaataaaatagtaagaatgtatagccctaccagcattcaacgaatctgccgttgccatatgatccggccatgggttcaaatcgaacccttcatggacggtgtagaaatttgtacagaaatggaaaaggaaggaaaaatttcaaaaattgggcctgaaaatccatacaatactccagtatttgccataaagaaaaaagacagtactaaatggagaaaattagtagatttcagagaacttaataagagaactcaagatttctgggaagttcaattaggaataccacatcctgcagggttaaaacagaaaaaatcagtaacagtactggatgtgggcgatgcatatttttcagttcccttagataaagacttcaggaagtatactgcatttaccatacctagtataaacaatgagacaccagggattagatatcagtacaatgtgcttccacagggatggaaaggatcaccagcaatattccagtgtagcatgacaaaaatcttagagccttttagaaaacaaaatccagacatagtcatctatcaatacatggatgatttgtatgtaggatctgacttagaaatagggcagcatagaacaaaaatagaggaactgagacaacatctgttgaggtggggatttaccacaccagacaaaaaacatcagaaagaacctccattcctttggatgggttatgaactccatcctgataaatggacagtacagcctatagtgctgccagaaaaggacagctggactgtcaatgacatacagaaattagtgggaaaattgaattgggcaagtcagatttatgcagggattaaagtaaggcaattatgtaaacttcttaggggaaccaaagcactaacagaagtagtaccactaacagaagaagcagagctagaactggcagaaaacagggagattctaaaagaaccggtacatggagtgtattatgacccatcaaaagacttaatagcagaaatacagaagcaggggcaaggccaatggacatatcaaatttatcaagagccatttaaaaatctgaaaacaggaaagtatgcaagaatgaagggtgcccacactaatgatgtgaaacaattaacagaggcagtacaaaaaatagccacagaaagcatagtaatatggggaaagactcctaaatttaaattacccatacaaaaggaaacatgggaagcatggtggacagagtattggcaagccacctggattcctgagtgggagtttgtcaatacccctcccttagtgaagttatggtaccagttagagaaagaacccataataggagcagaaactttctatgtagatggggcagccaatagggaaactaaattaggaaaagcaggatatgtaactgacagaggaagacaaaaagttgtccccctaacggacacaacaaatcagaagactgagttacaagcaattcatctagctttgcaggattcgggattagaagtaaacatagtgacagactcacaatatgcattgggaatcattcaagcacaaccagataagagtgaatcagagttagtcagtcaaataatagagcagttaataaaaaaggaaaaagtctacctggcatgggtaccagcacacaaaggaattggaggaaatgaacaagtagataaattggtcagtgctggaatcaggaaagtactatttttagatggaatagataaggcccaagaagaacatgagaaatatcacagtaattggagagcaatggctagtgattttaacctaccacctgtagtagcaaaagaaatagtagccagctgtgataaatgtcagctaaaaggggaagccatgcatggacaagtagactgtagcccaggaatatggcagctagattgtacacatttagaaggaaaagttatcttggtagcagttcatgtagccagtggatatatagaagcagaagtaattccagcagagacagggcaagaaacagcatacttcctcttaaaattagcaggaagatggccagtaaaaacagtacatacagacaatggcagcaatttcaccagtactacagttaaggccgcctgttggtgggcggggatcaagcaggaatttggcattccctacaatccccaaagtcaaggagtaatagaatctatgaataaagaattaaagaaaattataggacaggtaagagatcaggctgaacatcttaagacagcagtacaaatggcagtattcatccacaattttaaaagaaaaggggggattggggggtacagtgcaggggaaagaatagtagacataatagcaacagacatacaaactaaagaattacaaaaacaaattacaaaaattcaaaattttcgggtttattacagggacagcagagatccagtttggaaaggaccagcaaagctcctctggaaaggtgaaggggcagtagtaatacaagataatagtgacataaaagtagtgccaagaagaaaagcaaagatcatcagggattatggaaaacagatggcaggtgatgattgtgtggcaagtagacaggatgaggattaacacatggaaaagattagtaaaacaccatatgtatatttcaaggaaagctaaggactggttttatagacatcactatgaaagtactaatccaaaaataagttcagaagtacacatcccactaggggatgctaaattagtaataacaacatattggggtctgcatacaggagaaagagactggcatttgggtcagggagtctccatagaatggaggaaaaagagatatagcacacaagtagaccctgacctagcagaccaactaattcatctgcactattttgattgtttttcagaatctgctataagaaataccatattaggacgtatagttagtcctaggtgtgaatatcaagcaggacataacaaggtaggatctctacagtacttggcactagcagcattaataaaaccaaaacagataaagccacctttgcctagtgttaggaaactgacagaggacagatggaacaagccccagaagaccaagggccacagagggagccatacaatgaatggacactagagcttttagaggaacttaagagtgaagctgttagacattttcctaggatatggctccataacttaggacaacatatctatgaaacttacggggatacttgggcaggagtggaagccataataagaattctgcaacaactgctgtttatccatttcagaattgggtgtcgacatagcagaataggcgttactcgacagaggagagcaagaaatggagccagtagatcctagactagagccctggaagcatccaggaagtcagcctaaaactgcttgtaccaattgctattgtaaaaagtgttgctttcattgccaagtttgtttcatgacaaaagccttaggcatctcctatggcaggaagaagcggagacagcgacgaagagctcatcagaacagtcagactcatcaagcttctctatcaaagcagtaagtagtacatgtaatgcaacctataatagtagcaatagtagcattagtagtagcaataataatagcaatagttgtgtggtccatagtaatcatagaatataggaaaatattaagacaaagaaaaatagacaggttaattgatagactaatagaaagagcagaagacagtggcaatgagagtgaaggagaagtatcagcacttgtggagatgggggtggaaatggggcaccatgctccttgggatattgatgatctgtagtgctacagaaaaattgtgggtcacagtctattatggggtacctgtgtggaaggaagcaaccaccactctattttgtgcatcagatgctaaagcatatgatacagaggtacataatgtttgggccacacatgcctgtgtacccacagaccccaacccacaagaagtagtattggtaaatgtgacagaaaattttaacatgtggaaaaatgacatggtagaacagatgcatgaggatataatcagtttatgggatcaaagcctaaagccatgtgtaaaattaaccccactctgtgttagtttaaagtgcactgatttgaagaatgatactaataccaatagtagtagcgggagaatgataatggagaaaggagagataaaaaactgctctttcaatatcagcacaagcataagagataaggtgcagaaagaatatgcattcttttataaacttgatatagtaccaatagataataccagctataggttgataagttgtaacacctcagtcattacacaggcctgtccaaaggtatcctttgagccaattcccatacattattgtgccccggctggttttgcgattctaaaatgtaataataagacgttcaatggaacaggaccatgtacaaatgtcagcacagtacaatgtacacatggaatcaggccagtagtatcaactcaactgctgttaaatggcagtctagcagaagaagatgtagtaattagatctgccaatttcacagacaatgctaaaaccataatagtacagctgaacacatctgtagaaattaattgtacaagacccaacaacaatacaagaaaaagtatccgtatccagaggggaccagggagagcatttgttacaataggaaaaataggaaatatgagacaagcacattgtaacattagtagagcaaaatggaatgccactttaaaacagatagctagcaaattaagagaacaatttggaaataataaaacaataatctttaagcaatcctcaggaggggacccagaaattgtaacgcacagttttaattgtggaggggaatttttctactgtaattcaacacaactgtttaatagtacttggtttaatagtacttggagtactgaagggtcaaataacactgaaggaagtgacacaatcacactcccatgcagaataaaacaatttataaacatgtggcaggaagtaggaaaagcaatgtatgcccctcccatcagtggacaaattagatgttcatcaaatattactgggctgctattaacaagagatggtggtaataacaacaatgggtccgagatcttcagacctggaggaggcgatatgagggacaattggagaagtgaattatataaatataaagtagtaaaaattgaaccattaggagtagcacccaccaaggcaaagagaagagtggtgcagagagaaaaaagagcagtgggaataggagctttgttccttgggttcttgggagcagcaggaagcactatgggcgcagcgtcaatgacgctgacggtacaggccagacaattattgtctgatatagtgcagcagcagaacaatttgctgagggctattgaggcgcaacagcatctgttgcaactcacagtctggggcatcaaacagctccaggcaagaatcctggctgtggaaagatacctaaaggatcaacagctcctggggatttggggttgctctggaaaactcatttgcaccactgctgtgccttggaatgctagttggagtaataaatctctggaacagatttggaataacatgacctggatggagtgggacagagaaattaacaattacacaagcttaatacactccttaattgaagaatcgcaaaaccagcaagaaaagaatgaacaagaattattggaattagataaatgggcaagtttgtggaattggtttaacataacaaattggctgtggtatataaaattattcataatgatagtaggaggcttggtaggtttaagaatagtttttgctgtactttctatagtgaatagagttaggcagggatattcaccattatcgtttcagacccacctcccaatcccgaggggacccgacaggcccgaaggaatagaagaagaaggtggagagagagacagagacagatccattcgattagtgaacggatccttagcacttatctgggacgatctgcggagcctgtgcctcttcagctaccaccgcttgagagacttactcttgattgtaacgaggattgtggaacttctgggacgcagggggtgggaagccctcaaatattggtggaatctcctacagtattggagtcaggaactaaagaatagtgctgttaacttgctcaatgccacagccatagcagtagctgaggggacagatagggttatagaagtattacaagcagcttatagagctattcgccacatacctagaagaataagacagggcttggaaaggattttgctataagatgggtggcaagtggtcaaaaagtagtgtgattggatggcctgctgtaagggaaagaatgagacgagctgagccagcagcagatggggtgggagcagtatctcgagacctagaaaaacatggagcaatcacaagtagcaatacagcagctaacaatgctgcttgtgcctggctagaagcacaagaggaggaagaggtgggttttccagtcacacctcaggtacctttaagaccaatgacttacaaggcagctgtagatcttagccactttttaaaagaaaaggggggactggaagggctaattcactcccaaagaagacaagatatccttgatctgtggatctaccacacacaaggctacttccctgattggcagaactacacaccagggccaggggtcagatatccactgacctttggatggtgctacaagctagtaccagttgagccagataaggtagaagaggccaataaaggagagaacaccagcttgttacaccctgtgagcctgcatggaatggatgaccctgagagagaagtgttagagtggaggtttgacagccgcctagcatttcatcacgtggcccgagagctgcatccggagtacttcaagaactgctgacatcgagcttgctacaagggactttccgctggggactttccagggaggcgtggcctgggcgggactggggagtggcgagccctcagatgctgcatataagcagctgctttttgcctgtactgggtctctctggttagaccagatctgagcctgggagctctctggctaactagggaacccactgcttaagcctcaataaagcttgccttgagtgcttcaagtagtgtgtgcccgtctgttgtgtgactctggtaactagagatccctcagacccttttagtcagtgtggaaaatctctagca

SEQ ID NO: 77 - DNA, 7833 bp, Artificial Sequence
  Synthetic Sequence
tggaagggctaatttggtcccaaaaaagacaagagatccttgatctgtggatctaccacacacaaggctacttccctgattggcagaactacacaccagggccagggatcagatatccactgacctttggatggtgcttcaagttagtaccagttgaaccagagcaagtagaagaggccaatgaaggagagaacaacagcttgttacaccctatgagccagcatgggatggaggacccggagggagaagtattagtgtggaagtttgacagcctcctagcatttcgtcacatggcccgagagctgcatccggagtactacaaagactgctgacatcgagctttctacaagggactttccgctggggactttccagggaggtgtggcctgggcgggactggggagtggcgagccctcagatgctacatataagcagctgctttttgcctgtactgggtctctctggttagaccagatctgagcctgggagctctctggctaactagggaacccactgcttaagcctcaataaagcttgccttgagtgctcaaagtagtgtgtgcccgtctgttgtgtgactctggtaactagagatccctcagacccttttagtcagtgtggaaaatctctagcagtggcgcccgaacagggacttgaaagcgaaagtaaagccagaggagatctctcgacgcaggactcggcttgctgaagcgcgcacggcaagaggcgaggggcggcgactggtgagtacgccaaaaattttgactagcggaggctagaaggagagagatgggtgcgagagcgtcggtattaagcgggggagaattagataaatgggaaaaaattcggttaaggccagggggaaagaaacaatataaactaaaacatatagtatgggcaagcagggagctagaacgattcgcagttaatcctggccttttagagacatcagaaggctgtagacaaatactgggacagctacaaccatcccttcagacaggatcagaagaacttagatcattatataatacaatagcagtcctctattgtgtgcatcaaaggatagatgtaaaagacaccaaggaagccttagataagatagaggaagagcaaaacaaaagtaagaaaaaggcacagcaagcagcagctgacacaggaaacaacagccaggtcagccaaaattaccctatagtgcagaacctccaggggcaaatggtacatcaggccatatcacctagaactttaaatgcatgggtaaaagtagtagaagagaaggctttcagcccagaagtaatacccatgttttcagcattatcagaaggagccaccccacaagatttaaataccatgctaaacacagtggggggacatcaagcagccatgcaaatgttaaaagagaccatcaatgaggaagctgcagaatgggatagattgcatccagtgcatgcagggcctattgcaccaggccagatgagagaaccaaggggaagtgacatagcaggaactactagtacccttcaggaacaaataggatggatgacacataatccacctatcccagtaggagaaatctataaaagatggataatcctgggattaaataaaatagtaagaatgtatagccctaccagcattcaacgaatctgccgttgccatatgatccggccatgggttcaaatcgaacccttcatggacggtgtagaaatttgtacagaaatggaaaaggaaggaaaaatttcaaaaattgggcctgaaaatccatacaatactccagtatttgccataaagaaaaaagacagtactaaatggagaaaattagtagatttcagagaacttaataagagaactcaagatttctgggaagttcaattaggaataccacatcctgcagggttaaaacagaaaaaatcagtaacagtactggatgtgggcgatgcatatttttcagttcccttagataaagacttcaggaagtatactgcatttaccatacctagtataaacaatgagacaccagggattagatatcagtacaatgtgcttccacagggatggaaaggatcaccagcaatattccagtgtagcatgacaaaaatcttagagccttttagaaaacaaaatccagacatagtcatctatcaatacatggatgatttgtatgtaggatctgacttagaaatagggcagcatagaacaaaaatagaggaactgagacaacatctgttgaggtggggatttaccacaccagacaaaaaacatcagaaagaacctccattcctttggatgggttatgaactccatcctgataaatggacagtacagcctatagtgctgccagaaaaggacagctggactgtcaatgacatacagaaattagtgggaaaattgaattgggcaagtcagatttatgcagggattaaagtaaggcaattatgtaaacttcttaggggaaccaaagcactaacagaagtagtaccactaacagaagaagcagagctagaactggcagaaaacagggagattctaaaagaaccggtacatggagtgtattatgacccatcaaaagacttaatagcagaaatacagaagcaggggcaaggccaatggacatatcaaatttatcaagagccatttaaaaatctgaaaacaggaaagtatgcaagaatgaagggtgcccacactaatgatgtgaaacaattaacagaggcagtacaaaaaatagccacagaaagcatagtaatatggggaaagactcctaaatttaaattacccatacaaaaggaaacatgggaagcatggtggacagagtattggcaagccacctggattcctgagtgggagtttgtcaatacccctcccttagtgaagttatggtaccagttagagaaagaacccataataggagcagaaactttctatgtagatggggcagccaatagggaaactaaattaggaaaagcaggatatgtaactgacagaggaagacaaaaagttgtccccctaacggacacaacaaatcagaagactgagttacaagcaattcatctagctttgcaggattcgggattagaagtaaacatagtgacagactcacaatatgcattgggaatcattcaagcacaaccagataagagtgaatcagagttagtcagtcaaataatagagcagttaataaaaaaggaaaaagtctacctggcatgggtaccagcacacaaaggaattggaggaaatgaacaagtagataaattggtcagtgctggaatcaggaaagtactatttttagatggaatagataaggcccaagaagaacatgagaaatatcacagtaattggagagcaatggctagtgattttaacctaccacctgtagtagcaaaagaaatagtagccagctgtgataaatgtcagctaaaaggggaagccatgcatggacaagtagactgtagcccaggaatatggcagctagattgtacacatttagaaggaaaagttatcttggtagcagttcatgtagccagtggatatatagaagcagaagtaattccagcagagacagggcaagaaacagcatacttcctcttaaaattagcaggaagatggccagtaaaaacagtacatacagacaatggcagcaatttcaccagtactacagttaaggccgcctgttggtgggcggggatcaagcaggaatttggcattccctacaatccccaaagtcaaggagtaatagaatctatgaataaagaattaaagaaaattataggacaggtaagagatcaggctgaacatcttaagacagcagtacaaatggcagtattcatccacaattttaaaagaaaaggggggattggggggtacagtgcaggggaaagaatagtagacataatagcaacagacatacaaactaaagaattacaaaaacaaattacaaaaattcaaaattttcgggtttattacagggacagcagagatccagtttggaaaggaccagcaaagctcctctggaaaggtgaaggggcagtagtaatacaagataatagtgacataaaagtagtgccaagaagaaaagcaaagatcatcagggattatggaaaacagatggcaggtgatgattgtgtggcccgtccatgaagggttcgattcttgaacagcgcggtctgttatggcaacggcagattcgtttaatgcaacctataatagtagcaatagtagcattagtagtagcaataataatagcaatagttgtgtggtccatagtaatcatagaatataggaaaatattaagacaaagaaaaatagacaggttaattgatagactaatagaaagagcagaagacagtggcaatgagagtgaaggagaagtatcagcacttgtggagatgggggtggaaatggggcaccatgctccttgggatattgatgatctgtagtgctacagaaaaattgtgggtcacagtctattatggggtacctgtgtggaaggaagcaaccaccactctattttgtgcatcagatgctaaagcatatgatacagaggtacataatgtttgggccacacatgcctgtgtacccacagaccccaacccacaagaagtagtattggtaaatgtgacagaaaattttaacatgtggaaaaatgacatggtagaacagatgcatgaggatataatcagtttatgggatcaaagcctaaagccatgtgtaaaattaaccccactctgtgttagtttaaagtgcactgatttgaagaatgatactaataccaatagtagtagcgggagaatgataatggagaaaggagagataaaaaactgctctttcaatatcagcacaagcataagagataaggtgcagaaagaatatgcattcttttataaacttgatatagtaccaatagataataccagctataggttgataagttgtaacacctcagtcattacacaggcctgtccaaaggtatcctttgagccaattcccatacattattgtgccccggctggttttgcgattctaaaatgtaataataagacgttcaatggaacaggaccatgtacaaatgtcagcacagtacaatgtacacatggaatcaggccagtagtatcaactcaactgctgttaaatggcagtctagcagaagaagatgtagtaattagatctgccaatttcacagacaatgctaaaaccataatagtacagctgaacacatctgtagaaattaattgtacaagacccaacaacaatacaagaaaaagtatccgtatccagaggggaccagggagagcatttgttacaataggaaaaataggaaatatgagacaagcacattgtaacattagtagagcaaaatggaatgccactttaaaacagatagctagcaaattaagagaacaatttggaaataataaaacaataatctttaagcaatcctcaggaggggacccagaaattgtaacgcacagttttaattgtggaggggaatttttctactgtaattcaacacaactgtttaatagtacttggtttaatagtacttggagtactgaagggtcaaataacactgaaggaagtgacacaatcacactcccatgcagaataaaacaatttataaacatgtggcaggaagtaggaaaagcaatgtatgcccctcccatcagtggacaaattagatgttcatcaaatattactgggctgctattaacaagagatggtggtaataacaacaatgggtccgagatcttcagacctggaggaggcgatatgagggacaattggagaagtgaattatataaatataaagtagtaaaaattgaaccattaggagtagcacccaccaaggcaaagagaagagtggtgcagagagaaaaaagagcagtgggaataggagctttgttccttgggttcttgggagcagcaggaagcactatgggcgcagcgtcaatgacgctgacggtacaggccagacaattattgtctgatatagtgcagcagcagaacaatttgctgagggctattgaggcgcaacagcatctgttgcaactcacagtctggggcatcaaacagctccaggcaagaatcctggctgtggaaagatacctaaaggatcaacagctcctggggatttggggttgctctggaaaactcatttgcaccactgctgtgccttggaatgctagttggagtaataaatctctggaacagatttggaataacatgacctggatggagtgggacagagaaattaacaattacacaagcttaatacactccttaattgaagaatcgcaaaaccagcaagaaaagaatgaacaagaattattggaattagataaatgggcaagtttgtggaattggtttaacataacaaattggctgtggtatataaaattattcataatgatagtaggaggcttggtaggtttaagaatagtttttgctgtactttctatagtgaatagagttaggcagggatattcaccattatcgtttcagacccacctcccaatcccgaggggacccgacaggcccgaaggaatagaagaagaaggtggagagagagacagagacagatccattcgattagtgaacggatccttagcacttatctgggacgatctgcggagcctgtgcctcttcagctaccaccgcttgagagacttactcttgattgtaacgaggattgtggaacttctgggacgcagggggtgggaagccctcaaatattggtggaatctcctacagtattggagtcaggaactaaagaatagtgctgttaacttgctcaatgccacagccatagcagtagctgaggggacagatagggttatagaagtattacaagcagcttatagagctattcgccacatacctagaagaataagacagggcttggaaaggattttgctataagatgggtggcaagtggtcaaaaagtagtgtgattggatggcctgctgtaagggaaagaatgagacgagctgagccagcagcagatggggtgggagcagtatctcgagacctagaaaaacatggagcaatcacaagtagcaatacagcagctaacaatgctgcttgtgcctggctagaagcacaagaggaggaagaggtgggttttccagtcacacctcaggtacctttaagaccaatgacttacaaggcagctgtagatcttagccactttttaaaagaaaaggggggactggaagggctaattcactcccaaagaagacaagatatccttgatctgtggatctaccacacacaaggctacttccctgattggcagaactacacaccagggccaggggtcagatatccactgacctttggatggtgctacaagctagtaccagttgagccagataaggtagaagaggccaataaaggagagaacaccagcttgttacaccctgtgagcctgcatggaatggatgaccctgagagagaagtgttagagtggaggtttgacagccgcctagcatttcatcacgtggcccgagagctgcatccggagtacttcaagaactgctgacatcgagcttgctacaagggactttccgctggggactttccagggaggcgtggcctgggcgggactggggagtggcgagccctcagatgctgcatataagcagctgctttttgcctgtactgggtctctctggttagaccagatctgagcctgggagctctctggctaactagggaacccactgcttaagcctcaataaagcttgccttgagtgcttcaagtagtgtgtgcccgtctgttgtgtgactctggtaactagagatccctcagacccttttagtcagtgtggaaaatctctagca

SEQ ID NO: 78 - DNA, 7608 bp, Artificial Sequence
  Synthetic Sequence
tggaagggctaatttggtcccaaaaaagacaagagatccttgatctgtggatctaccacacacaaggctacttccctgattggcagaactacacaccagggccagggatcagatatccactgacctttggatggtgcttcaagttagtaccagttgaaccagagcaagtagaagaggccaatgaaggagagaacaacagcttgttacaccctatgagccagcatgggatggaggacccggagggagaagtattagtgtggaagtttgacagcctcctagcatttcgtcacatggcccgagagctgcatccggagtactacaaagactgctgacatcgagctttctacaagggactttccgctggggactttccagggaggtgtggcctgggcgggactggggagtggcgagccctcagatgctacatataagcagctgctttttgcctgtactgggtctctctggttagaccagatctgagcctgggagctctctggctaactagggaacccactgcttaagcctcaataaagcttgccttgagtgctcaaagtagtgtgtgcccgtctgttgtgtgactctggtaactagagatccctcagacccttttagtcagtgtggaaaatctctagcagtggcgcccgaacagggacttgaaagcgaaagtaaagccagaggagatctctcgacgcaggactcggcttgctgaagcgcgcacggcaagaggcgaggggcggcgactggtgagtacgccaaaaattttgactagcggaggctagaaggagagagatgggtgcgagagcgtcggtattaagcgggggagaattagataaatgggaaaaaattcggttaaggccagggggaaagaaacaatataaactaaaacatatagtatgggcaagcagggagctagaacgattcgcagttaatcctggccttttagagacatcagaaggctgtagacaaatactgggacagctacaaccatcccttcagacaggatcagaagaacttagatcattatataatacaatagcagtcctctattgtgtgcatcaaaggatagatgtaaaagacaccaaggaagccttagataagatagaggaagagcaaaacaaaagtaagaaaaaggcacagcaagcagcagctgacacaggaaacaacagccaggtcagccaaaattaccctatagtgcagaacctccaggggcaaatggtacatcaggccatatcacctagaactttaaatgcatgggtaaaagtagtagaagagaaggctttcagcccagaagtaatacccatgttttcagcattatcagaaggagccaccccacaagatttaaataccatgctaaacacagtggggggacatcaagcagccatgcaaatgttaaaagagaccatcaatgaggaagctgcagaatgggatagattgcatccagtgcatgcagggcctattgcaccaggccagatgagagaaccaaggggaagtgacatagcaggaactactagtacccttcaggaacaaataggatggatgacacataatccacctatcccagtaggagaaatctataaaagatggataatcctgggattaaataaaatagtaagaatgtatagccctaccagcattcaacgaatctgccgttgccatatgatccggccatgggttcaaatcgaacccttcatggacggtgtagaaatttgtacagaaatggaaaaggaaggaaaaatttcaaaaattgggcctgaaaatccatacaatactccagtatttgccataaagaaaaaagacagtactaaatggagaaaattagtagatttcagagaacttaataagagaactcaagatttctgggaagttcaattaggaataccacatcctgcagggttaaaacagaaaaaatcagtaacagtactggatgtgggcgatgcatatttttcagttcccttagataaagacttcaggaagtatactgcatttaccatacctagtataaacaatgagacaccagggattagatatcagtacaatgtgcttccacagggatggaaaggatcaccagcaatattccagtgtagcatgacaaaaatcttagagccttttagaaaacaaaatccagacatagtcatctatcaatacatggatgatttgtatgtaggatctgacttagaaatagggcagcatagaacaaaaatagaggaactgagacaacatctgttgaggtggggatttaccacaccagacaaaaaacatcagaaagaacctccattcctttggatgggttatgaactccatcctgataaatggacagtacagcctatagtgctgccagaaaaggacagctggactgtcaatgacatacagaaattagtgggaaaattgaattgggcaagtcagatttatgcagggattaaagtaaggcaattatgtaaacttcttaggggaaccaaagcactaacagaagtagtaccactaacagaagaagcagagctagaactggcagaaaacagggagattctaaaagaaccggtacatggagtgtattatgacccatcaaaagacttaatagcagaaatacagaagcaggggcaaggccaatggacatatcaaatttatcaagagccatttaaaaatctgaaaacaggaaagtatgcaagaatgaagggtgcccacactaatgatgtgaaacaattaacagaggcagtacaaaaaatagccacagaaagcatagtaatatggggaaagactcctaaatttaaattacccatacaaaaggaaacatgggaagcatggtggacagagtattggcaagccacctggattcctgagtgggagtttgtcaatacccctcccttagtgaagttatggtaccagttagagaaagaacccataataggagcagaaactttctatgtagatggggcagccaatagggaaactaaattaggaaaagcaggatatgtaactgacagaggaagacaaaaagttgtccccctaacggacacaacaaatcagaagactgagttacaagcaattcatctagctttgcaggattcgggattagaagtaaacatagtgacagactcacaatatgcattgggaatcattcaagcacaaccagataagagtgaatcagagttagtcagtcaaataatagagcagttaataaaaaaggaaaaagtctacctggcatgggtaccagcacacaaaggaattggaggaaatgaacaagtagataaattggtcagtgctggaatcaggaaagtactatttttagatggaatagataaggcccaagaagaacatgagaaatatcacagtaattggagagcaatggctagtgattttaacctaccacctgtagtagcaaaagaaatagtagccagctgtgataaatgtcagctaaaaggggaagccatgcatggacaagtagactgtagcccaggaatatggcagctagattgtacacatttagaaggaaaagttatcttggtagcagttcatgtagccagtggatatatagaagcagaagtaattccagcagagacagggcaagaaacagcatacttcctcttaaaattagcaggaagatggccagtaaaaacagtacatacagacaatggcagcaatttcaccagtactacagttaaggccgcctgttggtgggcggggatcaagcaggaatttggcattccctacaatccccaaagtcaaggagtaatagaatctatgaataaagaattaaagaaaattataggacaggtaagagatcaggctgaacatcttaagacagcagtacaaatggcagtattcatccacaattttaaaagaaaaggggggattggggggtacagtgcaggggaaagaatagtagacataatagcaacagacatacaaactaaagaattacaaaaacaaattacaaaaattcaaaattttcgggtttattacagggacagcagagatccagtttggaaaggaccagcaaagctcctctggaaaggtgaaggggcagtagtaatacaagataatagtgacataaaagtagtgccaagaagaaaagcaaagatcatcagggattaaccgtccatgaagggttcgattatctgtagccaacattcgatatggcaacggcagattcgttggagatgggggtggaaatggggcaccatgctccttgggatattgatgatctgtagtgctacagaaaaattgtgggtcacagtctattatggggtacctgtgtggaaggaagcaaccaccactctattttgtgcatcagatgctaaagcatatgatacagaggtacataatgtttgggccacacatgcctgtgtacccacagaccccaacccacaagaagtagtattggtaaatgtgacagaaaattttaacatgtggaaaaatgacatggtagaacagatgcatgaggatataatcagtttatgggatcaaagcctaaagccatgtgtaaaattaaccccactctgtgttagtttaaagtgcactgatttgaagaatgatactaataccaatagtagtagcgggagaatgataatggagaaaggagagataaaaaactgctctttcaatatcagcacaagcataagagataaggtgcagaaagaatatgcattcttttataaacttgatatagtaccaatagataataccagctataggttgataagttgtaacacctcagtcattacacaggcctgtccaaaggtatcctttgagccaattcccatacattattgtgccccggctggttttgcgattctaaaatgtaataataagacgttcaatggaacaggaccatgtacaaatgtcagcacagtacaatgtacacatggaatcaggccagtagtatcaactcaactgctgttaaatggcagtctagcagaagaagatgtagtaattagatctgccaatttcacagacaatgctaaaaccataatagtacagctgaacacatctgtagaaattaattgtacaagacccaacaacaatacaagaaaaagtatccgtatccagaggggaccagggagagcatttgttacaataggaaaaataggaaatatgagacaagcacattgtaacattagtagagcaaaatggaatgccactttaaaacagatagctagcaaattaagagaacaatttggaaataataaaacaataatctttaagcaatcctcaggaggggacccagaaattgtaacgcacagttttaattgtggaggggaatttttctactgtaattcaacacaactgtttaatagtacttggtttaatagtacttggagtactgaagggtcaaataacactgaaggaagtgacacaatcacactcccatgcagaataaaacaatttataaacatgtggcaggaagtaggaaaagcaatgtatgcccctcccatcagtggacaaattagatgttcatcaaatattactgggctgctattaacaagagatggtggtaataacaacaatgggtccgagatcttcagacctggaggaggcgatatgagggacaattggagaagtgaattatataaatataaagtagtaaaaattgaaccattaggagtagcacccaccaaggcaaagagaagagtggtgcagagagaaaaaagagcagtgggaataggagctttgttccttgggttcttgggagcagcaggaagcactatgggcgcagcgtcaatgacgctgacggtacaggccagacaattattgtctgatatagtgcagcagcagaacaatttgctgagggctattgaggcgcaacagcatctgttgcaactcacagtctggggcatcaaacagctccaggcaagaatcctggctgtggaaagatacctaaaggatcaacagctcctggggatttggggttgctctggaaaactcatttgcaccactgctgtgccttggaatgctagttggagtaataaatctctggaacagatttggaataacatgacctggatggagtgggacagagaaattaacaattacacaagcttaatacactccttaattgaagaatcgcaaaaccagcaagaaaagaatgaacaagaattattggaattagataaatgggcaagtttgtggaattggtttaacataacaaattggctgtggtatataaaattattcataatgatagtaggaggcttggtaggtttaagaatagtttttgctgtactttctatagtgaatagagttaggcagggatattcaccattatcgtttcagacccacctcccaatcccgaggggacccgacaggcccgaaggaatagaagaagaaggtggagagagagacagagacagatccattcgattagtgaacggatccttagcacttatctgggacgatctgcggagcctgtgcctcttcagctaccaccgcttgagagacttactcttgattgtaacgaggattgtggaacttctgggacgcagggggtgggaagccctcaaatattggtggaatctcctacagtattggagtcaggaactaaagaatagtgctgttaacttgctcaatgccacagccatagcagtagctgaggggacagatagggttatagaagtattacaagcagcttatagagctattcgccacatacctagaagaataagacagggcttggaaaggattttgctataagatgggtggcaagtggtcaaaaagtagtgtgattggatggcctgctgtaagggaaagaatgagacgagctgagccagcagcagatggggtgggagcagtatctcgagacctagaaaaacatggagcaatcacaagtagcaatacagcagctaacaatgctgcttgtgcctggctagaagcacaagaggaggaagaggtgggttttccagtcacacctcaggtacctttaagaccaatgacttacaaggcagctgtagatcttagccactttttaaaagaaaaggggggactggaagggctaattcactcccaaagaagacaagatatccttgatctgtggatctaccacacacaaggctacttccctgattggcagaactacacaccagggccaggggtcagatatccactgacctttggatggtgctacaagctagtaccagttgagccagataaggtagaagaggccaataaaggagagaacaccagcttgttacaccctgtgagcctgcatggaatggatgaccctgagagagaagtgttagagtggaggtttgacagccgcctagcatttcatcacgtggcccgagagctgcatccggagtacttcaagaactgctgacatcgagcttgctacaagggactttccgctggggactttccagggaggcgtggcctgggcgggactggggagtggcgagccctcagatgctgcatataagcagctgctttttgcctgtactgggtctctctggttagaccagatctgagcctgggagctctctggctaactagggaacccactgcttaagcctcaataaagcttgccttgagtgcttcaagtagtgtgtgcccgtctgttgtgtgactctggtaactagagatccctcagacccttttagtcagtgtggaaaatctctagca

SEQ ID NO: 79 - DNA, 7832 bp, Artificial Sequence
  Synthetic Sequence
tggaagggctaatttggtcccaaaaaagacaagagatccttgatctgtggatctaccacacacaaggctacttccctgattggcagaactacacaccagggccagggatcagatatccactgacctttggatggtgcttcaagttagtaccagttgaaccagagcaagtagaagaggccaatgaaggagagaacaacagcttgttacaccctatgagccagcatgggatggaggacccggagggagaagtattagtgtggaagtttgacagcctcctagcatttcgtcacatggcccgagagctgcatccggagtactacaaagactgctgacatcgagctttctacaagggactttccgctggggactttccagggaggtgtggcctgggcgggactggggagtggcgagccctcagatgctacatataagcagctgctttttgcctgtactgggtctctctggttagaccagatctgagcctgggagctctctggctaactagggaacccactgcttaagcctcaataaagcttgccttgagtgctcaaagtagtgtgtgcccgtctgttgtgtgactctggtaactagagatccctcagacccttttagtcagtgtggaaaatctctagcagtggcgcccgaacagggacttgaaagcgaaagtaaagccagaggagatctctcgacgcaggactcggcttgctgaagcgcgcacggcaagaggcgaggggcggcgactggtgagtacgccaaaaattttgactagcggaggctagaaggagagagatgggtgcgagagcgtcggtattaagcgggggagaattagataaatgggaaaaaattcggttaaggccagggggaaagaaacaatataaactaaaacatatagtatgggcaagcagggagctagaacgattcgcagttaatcctggccttttagagacatcagaaggctgtagacaaatactgggacagctacaaccatcccttcagacaggatcagaagaacttagatcattatataatacaatagcagtcctctattgtgtgcatcaaaggatagatgtaaaagacaccaaggaagccttagataagatagaggaagagcaaaacaaaagtaagaaaaaggcacagcaagcagcagctgacacaggaaacaacagccaggtcagccaaaattaccctatagtgcagaacctccaggggcaaatggtacatcaggccatatcacctagaactttaaatgcatgggtaaaagtagtagaagagaaggctttcagcccagaagtaatacccatgttttcagcattatcagaaggagccaccccacaagatttaaataccatgctaaacacagtggggggacatcaagcagccatgcaaatgttaaaagagaccatcaatgaggaagctgcagaatgggatagattgcatccagtgcatgcagggcctattgcaccaggccagatgagagaaccaaggggaagtgacatagcaggaactactagtacccttcaggaacaaataggatggatgacacataatccacctatcccagtaggagaaatctataaaagatggataatcctgggattaaataaaatagtaagaatgtatagccctaccagcattcaacgaatctgccgttgccatatgatccggccatgggttcaaatcgaacccttcatggacggtgtagaaatttgtacagaaatggaaaaggaaggaaaaatttcaaaaattgggcctgaaaatccatacaatactccagtatttgccataaagaaaaaagacagtactaaatggagaaaattagtagatttcagagaacttaataagagaactcaagatttctgggaagttcaattaggaataccacatcctgcagggttaaaacagaaaaaatcagtaacagtactggatgtgggcgatgcatatttttcagttcccttagataaagacttcaggaagtatactgcatttaccatacctagtataaacaatgagacaccagggattagatatcagtacaatgtgcttccacagggatggaaaggatcaccagcaatattccagtgtagcatgacaaaaatcttagagccttttagaaaacaaaatccagacatagtcatctatcaatacatggatgatttgtatgtaggatctgacttagaaatagggcagcatagaacaaaaatagaggaactgagacaacatctgttgaggtggggatttaccacaccagacaaaaaacatcagaaagaacctccattcctttggatgggttatgaactccatcctgataaatggacagtacagcctatagtgctgccagaaaaggacagctggactgtcaatgacatacagaaattagtgggaaaattgaattgggcaagtcagatttatgcagggattaaagtaaggcaattatgtaaacttcttaggggaaccaaagcactaacagaagtagtaccactaacagaagaagcagagctagaactggcagaaaacagggagattctaaaagaaccggtacatggagtgtattatgacccatcaaaagacttaatagcagaaatacagaagcaggggcaaggccaatggacatatcaaatttatcaagagccatttaaaaatctgaaaacaggaaagtatgcaagaatgaacgaatctgccgttgccatatacagcatctgaacaagctgatcgaacccttcatggacggttaaggccgcctgttggtgggcggggatcaagcaggaatttggcattccctacaatccccaaagtcaaggagtaatagaatctatgaataaagaattaaagaaaattataggacaggtaagagatcaggctgaacatcttaagacagcagtacaaatggcagtattcatccacaattttaaaagaaaaggggggattggggggtacagtgcaggggaaagaatagtagacataatagcaacagacatacaaactaaagaattacaaaaacaaattacaaaaattcaaaattttcgggtttattacagggacagcagagatccagtttggaaaggaccagcaaagctcctctggaaaggtgaaggggcagtagtaatacaagataatagtgacataaaagtagtgccaagaagaaaagcaaagatcatcagggattatggaaaacagatggcaggtgatgattgtgtggcaagtagacaggatgaggattaacacatggaaaagattagtaaaacaccatatgtatatttcaaggaaagctaaggactggttttatagacatcactatgaaagtactaatccaaaaataagttcagaagtacacatcccactaggggatgctaaattagtaataacaacatattggggtctgcatacaggagaaagagactggcatttgggtcagggagtctccatagaatggaggaaaaagagatatagcacacaagtagaccctgacctagcagaccaactaattcatctgcactattttgattgtttttcagaatctgctataagaaataccatattaggacgtatagttagtcctaggtgtgaatatcaagcaggacataacaaggtaggatctctacagtacttggcactagcagcattaataaaaccaaaacagataaagccacctttgcctagtgttaggaaactgacagaggacagatggaacaagccccagaagaccaagggccacagagggagccatacaatgaatggacactagagcttttagaggaacttaagagtgaagctgttagacattttcctaggatatggctccataacttaggacaacatatctatgaaacttacggggatacttgggcaggagtggaagccataataagaattctgcaacaactgctgtttatccatttcagaattgggtgtcgacatagcagaataggcgttactcgacagaggagagcaagaaatggagccagtagatcctagactagagccctggaagcatccaggaagtcagcctaaaactgcttgtaccaattgctattgtaaaaagtgttgctttcattgccaagtttgtttcatgacaaaagccttaggcatctcctatggcaggaagaagcggagacagcgacgaagagctcatcagaacagtcagactcatcaagcttctctatcaaagcagtaagtagtacatgtaatgcaacctataatagtagcaatagtagcattagtagtagcaataataatagcaatagttgtgtggtccatagtaatcatagaatataggaaaatattaagacaaagaaaaatagacaggttaattgatagactaatagaaagagcagaagacagtggcaatgagagtgaaggagaagtatcagcacttgtggagatgggggtggaaatggggcaccatgctccttgggatattgatgatctgtagtgctacagaaaaattgtgggtcacagtctattatggggtacctgtgtggaaggaagcaaccaccactctattttgtgcatcagatgctaaagcatatgatacagaggtacataatgtttgggccacacatgcctgtgtacccacagaccccaacccacaagaagtagtattggtaaatgtgacagaaaattttaacatgtggaaaaatgacatggtagaacagatgcatgaggatataatcagtttatgggatcaaagcctaaagccatgtgtaaaattaaccccactctgtgttagtttaaagtgcactgatttgaagaatgatactaataccaatagtagtagcgggagaatgataatggagaaaggagagataaaaaactgctctttcaatatcagcacaagcataagagataaggtgcagaaagaatatgcattcttttataaacttgatatagtaccaatagataataccagctataggttgataagttgtaacacctcagtcattacacaggcctgtccaaaggtatcctttgagccaattcccatacattattgtgccccggctggttttgcgattctaaaatgtaataataagacgttcaatggaacaggaccatgtacaaatgtcagcacagtacaatgtacacatggaatcaggccagtagtatcaactcaactgctgttaaatggcagtctagcagaagaagatgtagtaattagatctgccaatttcacagacaatgctaaaaccataatagtacagctgaacacatctgtagaaattaattgtacaagacccaacaacaatacaagaaaaagtatccgtatccagaggggaccagggagagcatttgttacaataggaaaaataggaaatatgagacaagcacattgtaacattagtagagcaaaatggaatgccactttaaaacagatagctagcaaattaagagaacaatttggaaataataaaacaataatctttaagcaatcctcaggaggggacccagaaattgtaacgcacagttttaattgtggaggggaatttttctactgtaattcaacacaactgtttaatagtacttggtttaatagtacttggagtactgaagggtcaaataacactgaaggaagtgacacaatcacactcccatgcagaataaaacaatttataaacatgtggcaggaagtaggaaaagcaatgtatgcccctcccatcagtggacaaattagatgttcatcaaatattactgggctgctattaacaagagatggtggtaataacaacaatgggtccgagatcttcagacctggaggaggcgatatgagggacaattggagaagtgaattatataaatataaagtagtaaaaattgaaccattaggagtagcacccaccaaggcaaagagaagagtggtgcagagagaaaaaagagcagtgggaataggagctttgttccttgggttcttgggagcagcaggaagcactatgggcgcagcgtcaatgacgctgacggtacaggccagacaattattgtctgatatagtgcagcagcagaacaatttgctgagggctattgaggcgcaacagcatctgttgcaactcacagtctggggcatcaaacagctccaggcaagaatcctggctgtggaaagatacctaaaggatcaacagctcctggggatttggggttgctctggaaaactcatttgcaccactgctgtgccttggaatgctagttggagtaataaatctctggaacagatttggaataacatgacctggatggagtgggacagagaaattaacaattacacaagcttaatacactccttaattgaagaatcgcaaaaccagcaagaaaagaatgaacaagaattattggaattagataaatgggcaagtttgtggaattggtttaacataacaaattggctgtggtatataaaattattcataatgatagtaggaggcttggtaggtttaagaatagtttttgctgtactttctatagtgaatagagttaggcagggatattcaccattatcgtttcagacccacctcccaatcccgaggggacccgacaggcccgaaggaatagaagaagaaggtggagagagagacagagacagatccattcgattagtgaacggatccttagcacttatctgggacgatctgcggagcctgtgcctcttcagctaccaccgcttgagagacttactcttgattgtaacgaggattgtggaacttctgggacgcagggggtgggaagccctcaaatattggtggaatctcctacagtattggagtcaggaactaaagaatagtgctgttaacttgctcaatgccacagccatagcagtagctgaggggacagatagggttatagaagtattacaagcagcttatagagctattcgccacatacctagaagaataagacagggcttggaaaggattttgctataagatgggtggcaagtggtcaaaaagtagtgtgattggatggcctgctgtaagggaaagaatgagacgagctgagccagcagcagatggggtgggagcagtatctcgagacctagaaaaacatggagcaatcacaagtagcaatacagcagctaacaatgctgcttgtgcctggctagaagcacaagaggaggaagaggtgggttttccagtcacacctcaggtacctttaagaccaatgacttacaaggcagctgtagatcttagccactttttaaaagaaaaggggggactggaagggctaattcactcccaaagaagacaagatatccttgatctgtggatctaccacacacaaggctacttccctgattggcagaactacacaccagggccaggggtcagatatccactgacctttggatggtgctacaagctagtaccagttgagccagataaggtagaagaggccaataaaggagagaacaccagcttgttacaccctgtgagcctgcatggaatggatgaccctgagagagaagtgttagagtggaggtttgacagccgcctagcatttcatcacgtggcccgagagctgcatccggagtacttcaagaactgctgacatcgagcttgctacaagggactttccgctggggactttccagggaggcgtggcctgggcgggactggggagtggcgagccctcagatgctgcatataagcagctgctttttgcctgtactgggtctctctggttagaccagatctgagcctgggagctctctggctaactagggaacccactgcttaagcctcaataaagcttgccttgagtgcttcaagtagtgtgtgcccgtctgttgtgtgactctggtaactagagatccctcagacccttttagtcagtgtggaaaatctctagca

SEQ ID NO: 80 - DNA, 6909 bp, Artificial Sequence
  Synthetic Sequence
tggaagggctaatttggtcccaaaaaagacaagagatccttgatctgtggatctaccacacacaaggctacttccctgattggcagaactacacaccagggccagggatcagatatccactgacctttggatggtgcttcaagttagtaccagttgaaccagagcaagtagaagaggccaatgaaggagagaacaacagcttgttacaccctatgagccagcatgggatggaggacccggagggagaagtattagtgtggaagtttgacagcctcctagcatttcgtcacatggcccgagagctgcatccggagtactacaaagactgctgacatcgagctttctacaagggactttccgctggggactttccagggaggtgtggcctgggcgggactggggagtggcgagccctcagatgctacatataagcagctgctttttgcctgtactgggtctctctggttagaccagatctgagcctgggagctctctggctaactagggaacccactgcttaagcctcaataaagcttgccttgagtgctcaaagtagtgtgtgcccgtctgttgtgtgactctggtaactagagatccctcagacccttttagtcagtgtggaaaatctctagcagtggcgcccgaacagggacttgaaagcgaaagtaaagccagaggagatctctcgacgcaggactcggcttgctgaagcgcgcacggcaagaggcgaggggcggcgactggtgagtacgccaaaaattttgactagcggaggctagaaggagagagatgggtgcgagagcgtcggtattaagcgggggagaattagataaatgggaaaaaattcggttaaggccagggggaaagaaacaatataaactaaaacatatagtatgggcaagcagggagctagaacgattcgcagttaatcctggccttttagagacatcagaaggctgtagacaaatactgggacagctacaaccatcccttcagacaggatcagaagaacttagatcattatataatacaatagcagtcctctattgtgtgcatcaaaggatagatgtaaaagacaccaaggaagccttagataagatagaggaagagcaaaacaaaagtaagaaaaaggcacagcaagcagcagctgacacaggaaacaacagccaggtcagccaaaattaccctatagtgcagaacctccaggggcaaatggtacatcaggccatatcacctagaactttaaatgcatgggtaaaagtagtagaagagaaggctttcagcccagaagtaatacccatgttttcagcattatcagaaggagccaccccacaagatttaaataccatgctaaacacagtggggggacatcaagcagccatgcaaatgttaaaagagaccatcaatgaggaagctgcagaatgggatagattgcatccagtgcatgcagggcctattgcaccaggccagatgagagaaccaaggggaagtgacatagcaggaactactagtacccttcaggaacaaataggatggatgacacataatccacctatcccagtaggagaaatctataaaagatggataatcctgggattaaataaaatagtaagaatgtatagccctaccagcattcaacgaatctgccgttgccatatgatccggccatgggttcaaatcgaacccttcatggacggtgtagaaatttgtacagaaatggaaaaggaaggaaaaatttcaaaaattgggcctgaaaatccatacaatactccagtatttgccataaagaaaaaagacagtactaaatggagaaaattagtagatttcagagaacttaataagagaactcaagatttctgggaagttcaattaggaataccacatcctgcagggttaaaacagaaaaaatcagtaacagtactggatgtgggcgatgcatatttttcagttcccttagataaagacttcaggaagtatactgcatttaccatacctagtataaacaatgagacaccagggattagatatcagtacaatgtgcttccacagggatggaaaggatcaccagcaatattccagtgtagcatgacaaaaatcttagagccttttagaaaacaaaatccagacatagtcatctatcaatacatggatgatttgtatgtaggatctgacttagaaatagggcagcatagaacaaaaatagaggaactgagacaacatctgttgaggtggggatttaccacaccagacaaaaaacatcagaaagaacctccattcctttggatgggttatgaactccatcctgataaatggacagtacagcctatagtgctgccagaaaaggacagctggactgtcaatgacatacagaaattagtgggaaaattgaattgggcaagtcagatttatgcagggattaaagtaaggcaattatgtaaacttcttaggggaaccaaagcactaacagaagtagtaccactaacagaagaagcagagctagaactggcagaaaacagggagattctaaaagaaccggtacatggagtgtattatgacccatcaaaagacttaatagcagaaatacagaagcaggggcaaggccaatggacatatcaaatttatcaagagccatttaaaaatctgaaaacaggaaagtatgcaagaatgaacgaatctgccgttgccatatacagcatctgaacaagctgatcgaacccttcatggacggttaaggccgcctgttggtgggcggggatcaagcaggaatttggcattccctacaatccccaaagtcaaggagtaatagaatctatgaataaagaattaaagaaaattataggacaggtaagagatcaggctgaacatcttaagacagcagtacaaatggcagtattcatccacaattttaaaagaaaaggggggattggggggtacagtgcaggggaaagaatagtagacataatagcaacagacatacaaactaaagaattacaaaaacaaattacaaaaattcaaaattttcgggtttattacagggacagcagagatccagtttggaaaggaccagcaaagctcctctggaaaggtgaaggggcagtagtaatacaagataatagtgacataaaagtagtgccaagaagaaaagcaaagatcatcagggattatggaaaacagatggcaggtgatgattgtgtggcccgtccatgaagggttcgattcttgaacagcgcggtctgttatggcaacggcagattcgtttaatgcaacctataatagtagcaatagtagcattagtagtagcaataataatagcaatagttgtgtggtccatagtaatcatagaatataggaaaatattaagacaaagaaaaatagacaggttaattgatagactaatagaaagagcagaagacagtggcaatgagagtgaaggagaagtatcagcacttgtggagatgggggtggaaatggggcaccatgctccttgggatattgatgatctgtagtgctacagaaaaattgtgggtcacagtctattatggggtacctgtgtggaaggaagcaaccaccactctattttgtgcatcagatgctaaagcatatgatacagaggtacataatgtttgggccacacatgcctgtgtacccacagaccccaacccacaagaagtagtattggtaaatgtgacagaaaattttaacatgtggaaaaatgacatggtagaacagatgcatgaggatataatcagtttatgggatcaaagcctaaagccatgtgtaaaattaaccccactctgtgttagtttaaagtgcactgatttgaagaatgatactaataccaatagtagtagcgggagaatgataatggagaaaggagagataaaaaactgctctttcaatatcagcacaagcataagagataaggtgcagaaagaatatgcattcttttataaacttgatatagtaccaatagataataccagctataggttgataagttgtaacacctcagtcattacacaggcctgtccaaaggtatcctttgagccaattcccatacattattgtgccccggctggttttgcgattctaaaatgtaataataagacgttcaatggaacaggaccatgtacaaatgtcagcacagtacaatgtacacatggaatcaggccagtagtatcaactcaactgctgttaaatggcagtctagcagaagaagatgtagtaattagatctgccaatttcacagacaatgctaaaaccataatagtacagctgaacacatctgtagaaattaattgtacaagacccaacaacaatacaagaaaaagtatccgtatccagaggggaccagggagagcatttgttacaataggaaaaataggaaatatgagacaagcacattgtaacattagtagagcaaaatggaatgccactttaaaacagatagctagcaaattaagagaacaatttggaaataataaaacaataatctttaagcaatcctcaggaggggacccagaaattgtaacgcacagttttaattgtggaggggaatttttctactgtaattcaacacaactgtttaatagtacttggtttaatagtacttggagtactgaagggtcaaataacactgaaggaagtgacacaatcacactcccatgcagaataaaacaatttataaacatgtggcaggaagtaggaaaagcaatgtatgcccctcccatcagtggacaaattagatgttcatcaaatattactgggctgctattaacaagagatggtggtaataacaacaatgggtccgagatcttcagacctggaggaggcgatatgagggacaattggagaagtgaattatataaatataaagtagtaaaaattgaaccattaggagtagcacccaccaaggcaaagagaagagtggtgcagagagaaaaaagagcagtgggaataggagctttgttccttgggttcttgggagcagcaggaagcactatgggcgcagcgtcaatgacgctgacggtacaggccagacaattattgtctgatatagtgcagcagcagaacaatttgctgagggctattgaggcgcaacagcatctgttgcaactcacagtctggggcatcaaacagctccaggcaagaatcctggctgtggaaagatacctaaaggatcaacagctcctggggatttggggttgctctggaaaactcatttgcaccactgctgtgccttggaatgctagttggagtaataaatctctggaacagatttggaataacatgacctggatggagtgggacagagaaattaacaattacacaagcttaatacactccttaattgaagaatcgcaaaaccagcaagaaaagaatgaacaagaattattggaattagataaatgggcaagtttgtggaattggtttaacataacaaattggctgtggtatataaaattattcataatgatagtaggaggcttggtaggtttaagaatagtttttgctgtactttctatagtgaatagagttaggcagggatattcaccattatcgtttcagacccacctcccaatcccgaggggacccgacaggcccgaaggaatagaagaagaaggtggagagagagacagagacagatccattcgattagtgaacggatccttagcacttatctgggacgatctgcggagcctgtgcctcttcagctaccaccgcttgagagacttactcttgattgtaacgaggattgtggaacttctgggacgcagggggtgggaagccctcaaatattggtggaatctcctacagtattggagtcaggaactaaagaatagtgctgttaacttgctcaatgccacagccatagcagtagctgaggggacagatagggttatagaagtattacaagcagcttatagagctattcgccacatacctagaagaataagacagggcttggaaaggattttgctataagatgggtggcaagtggtcaaaaagtagtgtgattggatggcctgctgtaagggaaagaatgagacgagctgagccagcagcagatggggtgggagcagtatctcgagacctagaaaaacatggagcaatcacaagtagcaatacagcagctaacaatgctgcttgtgcctggctagaagcacaagaggaggaagaggtgggttttccagtcacacctcaggtacctttaagaccaatgacttacaaggcagctgtagatcttagccactttttaaaagaaaaggggggactggaagggctaattcactcccaaagaagacaagatatccttgatctgtggatctaccacacacaaggctacttccctgattggcagaactacacaccagggccaggggtcagatatccactgacctttggatggtgctacaagctagtaccagttgagccagataaggtagaagaggccaataaaggagagaacaccagcttgttacaccctgtgagcctgcatggaatggatgaccctgagagagaagtgttagagtggaggtttgacagccgcctagcatttcatcacgtggcccgagagctgcatccggagtacttcaagaactgctgacatcgagcttgctacaagggactttccgctggggactttccagggaggcgtggcctgggcgggactggggagtggcgagccctcagatgctgcatataagcagctgctttttgcctgtactgggtctctctggttagaccagatctgagcctgggagctctctggctaactagggaacccactgcttaagcctcaataaagcttgccttgagtgcttcaagtagtgtgtgcccgtctgttgtgtgactctggtaactagagatccctcagacccttttagtcagtgtggaaaatctctagca

SEQ ID NO: 81 - DNA, 6684 bp, Artificial Sequence
  Synthetic Sequence
tggaagggctaatttggtcccaaaaaagacaagagatccttgatctgtggatctaccacacacaaggctacttccctgattggcagaactacacaccagggccagggatcagatatccactgacctttggatggtgcttcaagttagtaccagttgaaccagagcaagtagaagaggccaatgaaggagagaacaacagcttgttacaccctatgagccagcatgggatggaggacccggagggagaagtattagtgtggaagtttgacagcctcctagcatttcgtcacatggcccgagagctgcatccggagtactacaaagactgctgacatcgagctttctacaagggactttccgctggggactttccagggaggtgtggcctgggcgggactggggagtggcgagccctcagatgctacatataagcagctgctttttgcctgtactgggtctctctggttagaccagatctgagcctgggagctctctggctaactagggaacccactgcttaagcctcaataaagcttgccttgagtgctcaaagtagtgtgtgcccgtctgttgtgtgactctggtaactagagatccctcagacccttttagtcagtgtggaaaatctctagcagtggcgcccgaacagggacttgaaagcgaaagtaaagccagaggagatctctcgacgcaggactcggcttgctgaagcgcgcacggcaagaggcgaggggcggcgactggtgagtacgccaaaaattttgactagcggaggctagaaggagagagatgggtgcgagagcgtcggtattaagcgggggagaattagataaatgggaaaaaattcggttaaggccagggggaaagaaacaatataaactaaaacatatagtatgggcaagcagggagctagaacgattcgcagttaatcctggccttttagagacatcagaaggctgtagacaaatactgggacagctacaaccatcccttcagacaggatcagaagaacttagatcattatataatacaatagcagtcctctattgtgtgcatcaaaggatagatgtaaaagacaccaaggaagccttagataagatagaggaagagcaaaacaaaagtaagaaaaaggcacagcaagcagcagctgacacaggaaacaacagccaggtcagccaaaattaccctatagtgcagaacctccaggggcaaatggtacatcaggccatatcacctagaactttaaatgcatgggtaaaagtagtagaagagaaggctttcagcccagaagtaatacccatgttttcagcattatcagaaggagccaccccacaagatttaaataccatgctaaacacagtggggggacatcaagcagccatgcaaatgttaaaagagaccatcaatgaggaagctgcagaatgggatagattgcatccagtgcatgcagggcctattgcaccaggccagatgagagaaccaaggggaagtgacatagcaggaactactagtacccttcaggaacaaataggatggatgacacataatccacctatcccagtaggagaaatctataaaagatggataatcctgggattaaataaaatagtaagaatgtatagccctaccagcattcaacgaatctgccgttgccatatgatccggccatgggttcaaatcgaacccttcatggacggtgtagaaatttgtacagaaatggaaaaggaaggaaaaatttcaaaaattgggcctgaaaatccatacaatactccagtatttgccataaagaaaaaagacagtactaaatggagaaaattagtagatttcagagaacttaataagagaactcaagatttctgggaagttcaattaggaataccacatcctgcagggttaaaacagaaaaaatcagtaacagtactggatgtgggcgatgcatatttttcagttcccttagataaagacttcaggaagtatactgcatttaccatacctagtataaacaatgagacaccagggattagatatcagtacaatgtgcttccacagggatggaaaggatcaccagcaatattccagtgtagcatgacaaaaatcttagagccttttagaaaacaaaatccagacatagtcatctatcaatacatggatgatttgtatgtaggatctgacttagaaatagggcagcatagaacaaaaatagaggaactgagacaacatctgttgaggtggggatttaccacaccagacaaaaaacatcagaaagaacctccattcctttggatgggttatgaactccatcctgataaatggacagtacagcctatagtgctgccagaaaaggacagctggactgtcaatgacatacagaaattagtgggaaaattgaattgggcaagtcagatttatgcagggattaaagtaaggcaattatgtaaacttcttaggggaaccaaagcactaacagaagtagtaccactaacagaagaagcagagctagaactggcagaaaacagggagattctaaaagaaccggtacatggagtgtattatgacccatcaaaagacttaatagcagaaatacagaagcaggggcaaggccaatggacatatcaaatttatcaagagccatttaaaaatctgaaaacaggaaagtatgcaagaatgaacgaatctgccgttgccatatacagcatctgaacaagctgatcgaacccttcatggacggttaaggccgcctgttggtgggcggggatcaagcaggaatttggcattccctacaatccccaaagtcaaggagtaatagaatctatgaataaagaattaaagaaaattataggacaggtaagagatcaggctgaacatcttaagacagcagtacaaatggcagtattcatccacaattttaaaagaaaaggggggattggggggtacagtgcaggggaaagaatagtagacataatagcaacagacatacaaactaaagaattacaaaaacaaattacaaaaattcaaaattttcgggtttattacagggacagcagagatccagtttggaaaggaccagcaaagctcctctggaaaggtgaaggggcagtagtaatacaagataatagtgacataaaagtagtgccaagaagaaaagcaaagatcatcagggattaaccgtccatgaagggttcgattatctgtagccaacattcgatatggcaacggcagattcgttggagatgggggtggaaatggggcaccatgctccttgggatattgatgatctgtagtgctacagaaaaattgtgggtcacagtctattatggggtacctgtgtggaaggaagcaaccaccactctattttgtgcatcagatgctaaagcatatgatacagaggtacataatgtttgggccacacatgcctgtgtacccacagaccccaacccacaagaagtagtattggtaaatgtgacagaaaattttaacatgtggaaaaatgacatggtagaacagatgcatgaggatataatcagtttatgggatcaaagcctaaagccatgtgtaaaattaaccccactctgtgttagtttaaagtgcactgatttgaagaatgatactaataccaatagtagtagcgggagaatgataatggagaaaggagagataaaaaactgctctttcaatatcagcacaagcataagagataaggtgcagaaagaatatgcattcttttataaacttgatatagtaccaatagataataccagctataggttgataagttgtaacacctcagtcattacacaggcctgtccaaaggtatcctttgagccaattcccatacattattgtgccccggctggttttgcgattctaaaatgtaataataagacgttcaatggaacaggaccatgtacaaatgtcagcacagtacaatgtacacatggaatcaggccagtagtatcaactcaactgctgttaaatggcagtctagcagaagaagatgtagtaattagatctgccaatttcacagacaatgctaaaaccataatagtacagctgaacacatctgtagaaattaattgtacaagacccaacaacaatacaagaaaaagtatccgtatccagaggggaccagggagagcatttgttacaataggaaaaataggaaatatgagacaagcacattgtaacattagtagagcaaaatggaatgccactttaaaacagatagctagcaaattaagagaacaatttggaaataataaaacaataatctttaagcaatcctcaggaggggacccagaaattgtaacgcacagttttaattgtggaggggaatttttctactgtaattcaacacaactgtttaatagtacttggtttaatagtacttggagtactgaagggtcaaataacactgaaggaagtgacacaatcacactcccatgcagaataaaacaatttataaacatgtggcaggaagtaggaaaagcaatgtatgcccctcccatcagtggacaaattagatgttcatcaaatattactgggctgctattaacaagagatggtggtaataacaacaatgggtccgagatcttcagacctggaggaggcgatatgagggacaattggagaagtgaattatataaatataaagtagtaaaaattgaaccattaggagtagcacccaccaaggcaaagagaagagtggtgcagagagaaaaaagagcagtgggaataggagctttgttccttgggttcttgggagcagcaggaagcactatgggcgcagcgtcaatgacgctgacggtacaggccagacaattattgtctgatatagtgcagcagcagaacaatttgctgagggctattgaggcgcaacagcatctgttgcaactcacagtctggggcatcaaacagctccaggcaagaatcctggctgtggaaagatacctaaaggatcaacagctcctggggatttggggttgctctggaaaactcatttgcaccactgctgtgccttggaatgctagttggagtaataaatctctggaacagatttggaataacatgacctggatggagtgggacagagaaattaacaattacacaagcttaatacactccttaattgaagaatcgcaaaaccagcaagaaaagaatgaacaagaattattggaattagataaatgggcaagtttgtggaattggtttaacataacaaattggctgtggtatataaaattattcataatgatagtaggaggcttggtaggtttaagaatagtttttgctgtactttctatagtgaatagagttaggcagggatattcaccattatcgtttcagacccacctcccaatcccgaggggacccgacaggcccgaaggaatagaagaagaaggtggagagagagacagagacagatccattcgattagtgaacggatccttagcacttatctgggacgatctgcggagcctgtgcctcttcagctaccaccgcttgagagacttactcttgattgtaacgaggattgtggaacttctgggacgcagggggtgggaagccctcaaatattggtggaatctcctacagtattggagtcaggaactaaagaatagtgctgttaacttgctcaatgccacagccatagcagtagctgaggggacagatagggttatagaagtattacaagcagcttatagagctattcgccacatacctagaagaataagacagggcttggaaaggattttgctataagatgggtggcaagtggtcaaaaagtagtgtgattggatggcctgctgtaagggaaagaatgagacgagctgagccagcagcagatggggtgggagcagtatctcgagacctagaaaaacatggagcaatcacaagtagcaatacagcagctaacaatgctgcttgtgcctggctagaagcacaagaggaggaagaggtgggttttccagtcacacctcaggtacctttaagaccaatgacttacaaggcagctgtagatcttagccactttttaaaagaaaaggggggactggaagggctaattcactcccaaagaagacaagatatccttgatctgtggatctaccacacacaaggctacttccctgattggcagaactacacaccagggccaggggtcagatatccactgacctttggatggtgctacaagctagtaccagttgagccagataaggtagaagaggccaataaaggagagaacaccagcttgttacaccctgtgagcctgcatggaatggatgaccctgagagagaagtgttagagtggaggtttgacagccgcctagcatttcatcacgtggcccgagagctgcatccggagtacttcaagaactgctgacatcgagcttgctacaagggactttccgctggggactttccagggaggcgtggcctgggcgggactggggagtggcgagccctcagatgctgcatataagcagctgctttttgcctgtactgggtctctctggttagaccagatctgagcctgggagctctctggctaactagggaacccactgcttaagcctcaataaagcttgccttgagtgcttcaagtagtgtgtgcccgtctgttgtgtgactctggtaactagagatccctcagacccttttagtcagtgtggaaaatctctagca

SEQ ID NO: 82 - DNA, 8411 bp, Artificial Sequence
  Synthetic Sequence
tggaagggctaatttggtcccaaaaaagacaagagatccttgatctgtggatctaccacacacaaggctacttccctgattggcagaactacacaccagggccagggatcagatatccactgacctttggatggtgcttcaagttagtaccagttgaaccagagcaagtagaagaggccaatgaaggagagaacaacagcttgttacaccctatgagccagcatgggatggaggacccggagggagaagtattagtgtggaagtttgacagcctcctagcatttcgtcacatggcccgagagctgcatccggagtactacaaagactgctgacatcgagctttctacaagggactttccgctggggactttccagggaggtgtggcctgggcgggactggggagtggcgagccctcagatgctacatataagcagctgctttttgcctgtactgggtctctctggttagaccagatctgagcctgggagctctctggctaactagggaacccactgcttaagcctcaataaagcttgccttgagtgctcaaagtagtgtgtgcccgtctgttgtgtgactctggtaactagagatccctcagacccttttagtcagtgtggaaaatctctagcagtggcgcccgaacagggacttgaaagcgaaagtaaagccagaggagatctctcgacgcaggactcggcttgctgaagcgcgcacggcaagaggcgaggggcggcgactggtgagtacgccaaaaattttgactagcggaggctagaaggagagagatgggtgcgagagcgtcggtattaagcgggggagaattagataaatgggaaaaaattcggttaaggccagggggaaagaaacaatataaactaaaacatatagtatgggcaagcagggagctagaacgattcgcagttaatcctggccttttagagacatcagaaggctgtagacaaatactgggacagctacaaccatcccttcagacaggatcagaagaacttagatcattatataatacaatagcagtcctctattgtgtgcatcaaaggatagatgtaaaagacaccaaggaagccttagataagatagaggaagagcaaaacaaaagtaagaaaaaggcacagcaagcagcagctgacacaggaaacaacagccaggtcagccaaaattaccctatagtgcagaacctccaggggcaaatggtacatcaggccatatcacctagaactttaaatgcatgggtaaaagtagtagaagagaaggctttcagcccagaagtaatacccatgttttcagcattatcagaaggagccaccccacaagatttaaataccatgctaaacacagtggggggacatcaagcagccatgcaaatgttaaaagagaccatcaatgaggaagctgcagaatgggatagattgcatccagtgcatgcagggcctaccgtccatgaagggttcgattggacccgcccggacgctcatatggcaacggcagattcgttagttcaattaggaataccacatcctgcagggttaaaacagaaaaaatcagtaacagtactggatgtgggcgatgcatatttttcagttcccttagataaagacttcaggaagtatactgcatttaccatacctagtataaacaatgagacaccagggattagatatcagtacaatgtgcttccacagggatggaaaggatcaccagcaatattccagtgtagcatgacaaaaatcttagagccttttagaaaacaaaatccagacatagtcatctatcaatacatggatgatttgtatgtaggatctgacttagaaatagggcagcatagaacaaaaatagaggaactgagacaacatctgttgaggtggggatttaccacaccagacaaaaaacatcagaaagaacctccattcctttggatgggttatgaactccatcctgataaatggacagtacagcctatagtgctgccagaaaaggacagctggactgtcaatgacatacagaaattagtgggaaaattgaattgggcaagtcagatttatgcagggattaaagtaaggcaattatgtaaacttcttaggggaaccaaagcactaacagaagtagtaccactaacagaagaagcagagctagaactggcagaaaacagggagattctaaaagaaccggtacatggagtgtattatgacccatcaaaagacttaatagcagaaatacagaagcaggggcaaggccaatggacatatcaaatttatcaagagccatttaaaaatctgaaaacaggaaagtatgcaagaatgaagggtgcccacactaatgatgtgaaacaattaacagaggcagtacaaaaaatagccacagaaagcatagtaatatggggaaagactcctaaatttaaattacccatacaaaaggaaacatgggaagcatggtggacagagtattggcaagccacctggattcctgagtgggagtttgtcaatacccctcccttagtgaagttatggtaccagttagagaaagaacccataataggagcagaaactttctatgtagatggggcagccaatagggaaactaaattaggaaaagcaggatatgtaactgacagaggaagacaaaaagttgtccccctaacggacacaacaaatcagaagactgagttacaagcaattcatctagctttgcaggattcgggattagaagtaaacatagtgacagactcacaatatgcattgggaatcattcaagcacaaccagataagagtgaatcagagttagtcagtcaaataatagagcagttaataaaaaaggaaaaagtctacctggcatgggtaccagcacacaaaggaattggaggaaatgaacaagtagataaattggtcagtgctggaatcaggaaagtactatttttagatggaatagataaggcccaagaagaacatgagaaatatcacagtaattggagagcaatggctagtgattttaacctaccacctgtagtagcaaaagaaatagtagccagctgtgataaatgtcagctaaaaggggaagccatgcatggacaagtagactgtagcccaggaatatggcagctagattgtacacatttagaaggaaaagttatcttggtagcagttcatgtagccagtggatatatagaagcagaagtaattccagcagagacagggcaagaaacagcatacttcctcttaaaattagcaggaagatggccagtaaaaacagtacatacagacaatggcagcaatttcaccagtactacagttaaggccgcctgttggtgggcggggatcaagcaggaatttggcattccctacaatccccaaagtcaaggagtaatagaatctatgaataaagaattaaagaaaattataggacaggtaagagatcaggctgaacatcttaagacagcagtacaaatggcagtattcatccacaattttaaaagaaaaggggggattggggggtacagtgcaggggaaagaatagtagacataatagcaacagacatacaaactaaagaattacaaaaacaaattacaaaaattcaaaattttcgggtttattacagggacagcagagatccagtttggaaaggaccagcaaagctcctctggaaaggtgaaggggcagtagtaatacaagataatagtgacataaaagtagtgccaagaagaaaagcaaagatcatcagggattatggaaaacagatggcaggtgatgattgtgtggcaagtagacaggatgaggattaacacatggaaaagattagtaaaacaccatatgtatatttcaaggaaagctaaggactggttttatagacatcactatgaaagtactaatccaaaaataagttcagaagtacacatcccactaggggatgctaaattagtaataacaacatattggggtctgcatacaggagaaagagactggcatttgggtcagggagtctccatagaatggaggaaaaagagatatagcacacaagtagaccctgacctagcagaccaactaattcatctgcactattttgattgtttttcagaatctgctataagaaataccatattaggacgtatagttagtcctaggtgtgaatatcaagcaggacataacaaggtaggatctctacagtacttggcactagcagcattaataaaaccaaaacagataaagccacctttgcctagtgttaggaaactgacagaggacagatggaacaagccccagaagaccaagggccacagagggagccatacaatgaatggacactagagcttttagaggaacttaagagtgaagctgttagacattttcctaggatatggctccataacttaggacaacatatctatgaaacttacggggatacttgggcaggagtggaagccataataagaattctgcaacaactgctgtttatccatttcagaattgggtgtcgacatagcagaataggcgttactcgacagaggagagcaagaaatggagccagtagatcctagactagagccctggaagcatccaggaagtcagcctaaaactgcttgtaccaattgctattgtaaaaagtgttgctttcattgccaagtttgtttcatgacaaaagccttaggcatctcctatggcaggaagaagcggagacagcgacgaagagctcatcagaacagtcagactcatcaagcttctctatcaaagcagtaagtagtacatgtaatgcaacctataatagtagcaatagtagcattagtagtagcaataataatagcaatagttgtgtggtccatagtaatcatagaatataggaaaatattaagacaaagaaaaatagacaggttaattgatagactaatagaaagagcagaagacagtggcaatgagagtgaaggagaagtatcagcacttgtggagatgggggtggaaatggggcaccatgctccttgggatattgatgatctgtagtgctacagaaaaattgtgggtcacagtctattatggggtacctgtgtggaaggaagcaaccaccactctattttgtgcatcagatgctaaagcatatgatacagaggtacataatgtttgggccacacatgcctgtgtacccacagaccccaacccacaagaagtagtattggtaaatgtgacagaaaattttaacatgtggaaaaatgacatggtagaacagatgcatgaggatataatcagtttatgggatcaaagcctaaagccatgtgtaaaattaaccccactctgtgttagtttaaagtgcactgatttgaagaatgatactaataccaatagtagtagcgggagaatgataatggagaaaggagagataaaaaactgctctttcaatatcagcacaagcataagagataaggtgcagaaagaatatgcattcttttataaacttgatatagtaccaatagataataccagctataggttgataagttgtaacacctcagtcattacacaggcctgtccaaaggtatcctttgagccaattcccatacattattgtgccccggctggttttgcgattctaaaatgtaataataagacgttcaatggaacaggaccatgtacaaatgtcagcacagtacaatgtacacatggaatcaggccagtagtatcaactcaactgctgttaaatggcagtctagcagaagaagatgtagtaattagatctgccaatttcacagacaatgctaaaaccataatagtacagctgaacacatctgtagaaattaattgtacaagacccaacaacaatacaagaaaaagtatccgtatccagaggggaccagggagagcatttgttacaataggaaaaataggaaatatgagacaagcacattgtaacattagtagagcaaaatggaatgccactttaaaacagatagctagcaaattaagagaacaatttggaaataataaaacaataatctttaagcaatcctcaggaggggacccagaaattgtaacgcacagttttaattgtggaggggaatttttctactgtaattcaacacaactgtttaatagtacttggtttaatagtacttggagtactgaagggtcaaataacactgaaggaagtgacacaatcacactcccatgcagaataaaacaatttataaacatgtggcaggaagtaggaaaagcaatgtatgcccctcccatcagtggacaaattagatgttcatcaaatattactgggctgctattaacaagagatggtggtaataacaacaatgggtccgagatcttcagacctggaggaggcgatatgagggacaattggagaagtgaattatataaatataaagtagtaaaaattgaaccattaggagtagcacccaccaaggcaaagagaagagtggtgcagagagaaaaaagagcagtgggaataggagctttgttccttgggttcttgggagcagcaggaagcactatgggcgcagcgtcaatgacgctgacggtacaggccagacaattattgtctgatatagtgcagcagcagaacaatttgctgagggctattgaggcgcaacagcatctgttgcaactcacagtctggggcatcaaacagctccaggcaagaatcctggctgtggaaagatacctaaaggatcaacagctcctggggatttggggttgctctggaaaactcatttgcaccactgctgtgccttggaatgctagttggagtaataaatctctggaacagatttggaataacatgacctggatggagtgggacagagaaattaacaattacacaagcttaatacactccttaattgaagaatcgcaaaaccagcaagaaaagaatgaacaagaattattggaattagataaatgggcaagtttgtggaattggtttaacataacaaattggctgtggtatataaaattattcataatgatagtaggaggcttggtaggtttaagaatagtttttgctgtactttctatagtgaatagagttaggcagggatattcaccattatcgtttcagacccacctcccaatcccgaggggacccgacaggcccgaaggaatagaagaagaaggtggagagagagacagagacagatccattcgattagtgaacggatccttagcacttatctgggacgatctgcggagcctgtgcctcttcagctaccaccgcttgagagacttactcttgattgtaacgaggattgtggaacttctgggacgcagggggtgggaagccctcaaatattggtggaatctcctacagtattggagtcaggaactaaagaatagtgctgttaacttgctcaatgccacagccatagcagtagctgaggggacagatagggttatagaagtattacaagcagcttatagagctattcgccacatacctagaagaataagacagggcttggaaaggattttgctataagatgggtggcaagtggtcaaaaagtagtgtgattggatggcctgctgtaagggaaagaatgagacgagctgagccagcagcagatggggtgggagcagtatctcgagacctagaaaaacatggagcaatcacaagtagcaatacagcagctaacaatgctgcttgtgcctggctagaagcacaagaggaggaagaggtgggttttccagtcacacctcaggtacctttaagaccaatgacttacaaggcagctgtagatcttagccactttttaaaagaaaaggggggactggaagggctaattcactcccaaagaagacaagatatccttgatctgtggatctaccacacacaaggctacttccctgattggcagaactacacaccagggccaggggtcagatatccactgacctttggatggtgctacaagctagtaccagttgagccagataaggtagaagaggccaataaaggagagaacaccagcttgttacaccctgtgagcctgcatggaatggatgaccctgagagagaagtgttagagtggaggtttgacagccgcctagcatttcatcacgtggcccgagagctgcatccggagtacttcaagaactgctgacatcgagcttgctacaagggactttccgctggggactttccagggaggcgtggcctgggcgggactggggagtggcgagccctcagatgctgcatataagcagctgctttttgcctgtactgggtctctctggttagaccagatctgagcctgggagctctctggctaactagggaacccactgcttaagcctcaataaagcttgccttgagtgcttcaagtagtgtgtgcccgtctgttgtgtgactctggtaactagagatccctcagacccttttagtcagtgtggaaaatctctagca

SEQ ID NO: 83 - DNA, 7488 bp, Artificial Sequence
  Synthetic Sequence
tggaagggctaatttggtcccaaaaaagacaagagatccttgatctgtggatctaccacacacaaggctacttccctgattggcagaactacacaccagggccagggatcagatatccactgacctttggatggtgcttcaagttagtaccagttgaaccagagcaagtagaagaggccaatgaaggagagaacaacagcttgttacaccctatgagccagcatgggatggaggacccggagggagaagtattagtgtggaagtttgacagcctcctagcatttcgtcacatggcccgagagctgcatccggagtactacaaagactgctgacatcgagctttctacaagggactttccgctggggactttccagggaggtgtggcctgggcgggactggggagtggcgagccctcagatgctacatataagcagctgctttttgcctgtactgggtctctctggttagaccagatctgagcctgggagctctctggctaactagggaacccactgcttaagcctcaataaagcttgccttgagtgctcaaagtagtgtgtgcccgtctgttgtgtgactctggtaactagagatccctcagacccttttagtcagtgtggaaaatctctagcagtggcgcccgaacagggacttgaaagcgaaagtaaagccagaggagatctctcgacgcaggactcggcttgctgaagcgcgcacggcaagaggcgaggggcggcgactggtgagtacgccaaaaattttgactagcggaggctagaaggagagagatgggtgcgagagcgtcggtattaagcgggggagaattagataaatgggaaaaaattcggttaaggccagggggaaagaaacaatataaactaaaacatatagtatgggcaagcagggagctagaacgattcgcagttaatcctggccttttagagacatcagaaggctgtagacaaatactgggacagctacaaccatcccttcagacaggatcagaagaacttagatcattatataatacaatagcagtcctctattgtgtgcatcaaaggatagatgtaaaagacaccaaggaagccttagataagatagaggaagagcaaaacaaaagtaagaaaaaggcacagcaagcagcagctgacacaggaaacaacagccaggtcagccaaaattaccctatagtgcagaacctccaggggcaaatggtacatcaggccatatcacctagaactttaaatgcatgggtaaaagtagtagaagagaaggctttcagcccagaagtaatacccatgttttcagcattatcagaaggagccaccccacaagatttaaataccatgctaaacacagtggggggacatcaagcagccatgcaaatgttaaaagagaccatcaatgaggaagctgcagaatgggatagattgcatccagtgcatgcagggcctaccgtccatgaagggttcgattggacccgcccggacgctcatatggcaacggcagattcgttagttcaattaggaataccacatcctgcagggttaaaacagaaaaaatcagtaacagtactggatgtgggcgatgcatatttttcagttcccttagataaagacttcaggaagtatactgcatttaccatacctagtataaacaatgagacaccagggattagatatcagtacaatgtgcttccacagggatggaaaggatcaccagcaatattccagtgtagcatgacaaaaatcttagagccttttagaaaacaaaatccagacatagtcatctatcaatacatggatgatttgtatgtaggatctgacttagaaatagggcagcatagaacaaaaatagaggaactgagacaacatctgttgaggtggggatttaccacaccagacaaaaaacatcagaaagaacctccattcctttggatgggttatgaactccatcctgataaatggacagtacagcctatagtgctgccagaaaaggacagctggactgtcaatgacatacagaaattagtgggaaaattgaattgggcaagtcagatttatgcagggattaaagtaaggcaattatgtaaacttcttaggggaaccaaagcactaacagaagtagtaccactaacagaagaagcagagctagaactggcagaaaacagggagattctaaaagaaccggtacatggagtgtattatgacccatcaaaagacttaatagcagaaatacagaagcaggggcaaggccaatggacatatcaaatttatcaagagccatttaaaaatctgaaaacaggaaagtatgcaagaatgaagggtgcccacactaatgatgtgaaacaattaacagaggcagtacaaaaaatagccacagaaagcatagtaatatggggaaagactcctaaatttaaattacccatacaaaaggaaacatgggaagcatggtggacagagtattggcaagccacctggattcctgagtgggagtttgtcaatacccctcccttagtgaagttatggtaccagttagagaaagaacccataataggagcagaaactttctatgtagatggggcagccaatagggaaactaaattaggaaaagcaggatatgtaactgacagaggaagacaaaaagttgtccccctaacggacacaacaaatcagaagactgagttacaagcaattcatctagctttgcaggattcgggattagaagtaaacatagtgacagactcacaatatgcattgggaatcattcaagcacaaccagataagagtgaatcagagttagtcagtcaaataatagagcagttaataaaaaaggaaaaagtctacctggcatgggtaccagcacacaaaggaattggaggaaatgaacaagtagataaattggtcagtgctggaatcaggaaagtactatttttagatggaatagataaggcccaagaagaacatgagaaatatcacagtaattggagagcaatggctagtgattttaacctaccacctgtagtagcaaaagaaatagtagccagctgtgataaatgtcagctaaaaggggaagccatgcatggacaagtagactgtagcccaggaatatggcagctagattgtacacatttagaaggaaaagttatcttggtagcagttcatgtagccagtggatatatagaagcagaagtaattccagcagagacagggcaagaaacagcatacttcctcttaaaattagcaggaagatggccagtaaaaacagtacatacagacaatggcagcaatttcaccagtactacagttaaggccgcctgttggtgggcggggatcaagcaggaatttggcattccctacaatccccaaagtcaaggagtaatagaatctatgaataaagaattaaagaaaattataggacaggtaagagatcaggctgaacatcttaagacagcagtacaaatggcagtattcatccacaattttaaaagaaaaggggggattggggggtacagtgcaggggaaagaatagtagacataatagcaacagacatacaaactaaagaattacaaaaacaaattacaaaaattcaaaattttcgggtttattacagggacagcagagatccagtttggaaaggaccagcaaagctcctctggaaaggtgaaggggcagtagtaatacaagataatagtgacataaaagtagtgccaagaagaaaagcaaagatcatcagggattatggaaaacagatggcaggtgatgattgtgtggcccgtccatgaagggttcgattcttgaacagcgcggtctgttatggcaacggcagattcgtttaatgcaacctataatagtagcaatagtagcattagtagtagcaataataatagcaatagttgtgtggtccatagtaatcatagaatataggaaaatattaagacaaagaaaaatagacaggttaattgatagactaatagaaagagcagaagacagtggcaatgagagtgaaggagaagtatcagcacttgtggagatgggggtggaaatggggcaccatgctccttgggatattgatgatctgtagtgctacagaaaaattgtgggtcacagtctattatggggtacctgtgtggaaggaagcaaccaccactctattttgtgcatcagatgctaaagcatatgatacagaggtacataatgtttgggccacacatgcctgtgtacccacagaccccaacccacaagaagtagtattggtaaatgtgacagaaaattttaacatgtggaaaaatgacatggtagaacagatgcatgaggatataatcagtttatgggatcaaagcctaaagccatgtgtaaaattaaccccactctgtgttagtttaaagtgcactgatttgaagaatgatactaataccaatagtagtagcgggagaatgataatggagaaaggagagataaaaaactgctctttcaatatcagcacaagcataagagataaggtgcagaaagaatatgcattcttttataaacttgatatagtaccaatagataataccagctataggttgataagttgtaacacctcagtcattacacaggcctgtccaaaggtatcctttgagccaattcccatacattattgtgccccggctggttttgcgattctaaaatgtaataataagacgttcaatggaacaggaccatgtacaaatgtcagcacagtacaatgtacacatggaatcaggccagtagtatcaactcaactgctgttaaatggcagtctagcagaagaagatgtagtaattagatctgccaatttcacagacaatgctaaaaccataatagtacagctgaacacatctgtagaaattaattgtacaagacccaacaacaatacaagaaaaagtatccgtatccagaggggaccagggagagcatttgttacaataggaaaaataggaaatatgagacaagcacattgtaacattagtagagcaaaatggaatgccactttaaaacagatagctagcaaattaagagaacaatttggaaataataaaacaataatctttaagcaatcctcaggaggggacccagaaattgtaacgcacagttttaattgtggaggggaatttttctactgtaattcaacacaactgtttaatagtacttggtttaatagtacttggagtactgaagggtcaaataacactgaaggaagtgacacaatcacactcccatgcagaataaaacaatttataaacatgtggcaggaagtaggaaaagcaatgtatgcccctcccatcagtggacaaattagatgttcatcaaatattactgggctgctattaacaagagatggtggtaataacaacaatgggtccgagatcttcagacctggaggaggcgatatgagggacaattggagaagtgaattatataaatataaagtagtaaaaattgaaccattaggagtagcacccaccaaggcaaagagaagagtggtgcagagagaaaaaagagcagtgggaataggagctttgttccttgggttcttgggagcagcaggaagcactatgggcgcagcgtcaatgacgctgacggtacaggccagacaattattgtctgatatagtgcagcagcagaacaatttgctgagggctattgaggcgcaacagcatctgttgcaactcacagtctggggcatcaaacagctccaggcaagaatcctggctgtggaaagatacctaaaggatcaacagctcctggggatttggggttgctctggaaaactcatttgcaccactgctgtgccttggaatgctagttggagtaataaatctctggaacagatttggaataacatgacctggatggagtgggacagagaaattaacaattacacaagcttaatacactccttaattgaagaatcgcaaaaccagcaagaaaagaatgaacaagaattattggaattagataaatgggcaagtttgtggaattggtttaacataacaaattggctgtggtatataaaattattcataatgatagtaggaggcttggtaggtttaagaatagtttttgctgtactttctatagtgaatagagttaggcagggatattcaccattatcgtttcagacccacctcccaatcccgaggggacccgacaggcccgaaggaatagaagaagaaggtggagagagagacagagacagatccattcgattagtgaacggatccttagcacttatctgggacgatctgcggagcctgtgcctcttcagctaccaccgcttgagagacttactcttgattgtaacgaggattgtggaacttctgggacgcagggggtgggaagccctcaaatattggtggaatctcctacagtattggagtcaggaactaaagaatagtgctgttaacttgctcaatgccacagccatagcagtagctgaggggacagatagggttatagaagtattacaagcagcttatagagctattcgccacatacctagaagaataagacagggcttggaaaggattttgctataagatgggtggcaagtggtcaaaaagtagtgtgattggatggcctgctgtaagggaaagaatgagacgagctgagccagcagcagatggggtgggagcagtatctcgagacctagaaaaacatggagcaatcacaagtagcaatacagcagctaacaatgctgcttgtgcctggctagaagcacaagaggaggaagaggtgggttttccagtcacacctcaggtacctttaagaccaatgacttacaaggcagctgtagatcttagccactttttaaaagaaaaggggggactggaagggctaattcactcccaaagaagacaagatatccttgatctgtggatctaccacacacaaggctacttccctgattggcagaactacacaccagggccaggggtcagatatccactgacctttggatggtgctacaagctagtaccagttgagccagataaggtagaagaggccaataaaggagagaacaccagcttgttacaccctgtgagcctgcatggaatggatgaccctgagagagaagtgttagagtggaggtttgacagccgcctagcatttcatcacgtggcccgagagctgcatccggagtacttcaagaactgctgacatcgagcttgctacaagggactttccgctggggactttccagggaggcgtggcctgggcgggactggggagtggcgagccctcagatgctgcatataagcagctgctttttgcctgtactgggtctctctggttagaccagatctgagcctgggagctctctggctaactagggaacccactgcttaagcctcaataaagcttgccttgagtgcttcaagtagtgtgtgcccgtctgttgtgtgactctggtaactagagatccctcagacccttttagtcagtgtggaaaatctctagca

SEQ ID NO: 84 - DNA, 7263 bp, Artificial Sequence
  Synthetic Sequence
tggaagggctaatttggtcccaaaaaagacaagagatccttgatctgtggatctaccacacacaaggctacttccctgattggcagaactacacaccagggccagggatcagatatccactgacctttggatggtgcttcaagttagtaccagttgaaccagagcaagtagaagaggccaatgaaggagagaacaacagcttgttacaccctatgagccagcatgggatggaggacccggagggagaagtattagtgtggaagtttgacagcctcctagcatttcgtcacatggcccgagagctgcatccggagtactacaaagactgctgacatcgagctttctacaagggactttccgctggggactttccagggaggtgtggcctgggcgggactggggagtggcgagccctcagatgctacatataagcagctgctttttgcctgtactgggtctctctggttagaccagatctgagcctgggagctctctggctaactagggaacccactgcttaagcctcaataaagcttgccttgagtgctcaaagtagtgtgtgcccgtctgttgtgtgactctggtaactagagatccctcagacccttttagtcagtgtggaaaatctctagcagtggcgcccgaacagggacttgaaagcgaaagtaaagccagaggagatctctcgacgcaggactcggcttgctgaagcgcgcacggcaagaggcgaggggcggcgactggtgagtacgccaaaaattttgactagcggaggctagaaggagagagatgggtgcgagagcgtcggtattaagcgggggagaattagataaatgggaaaaaattcggttaaggccagggggaaagaaacaatataaactaaaacatatagtatgggcaagcagggagctagaacgattcgcagttaatcctggccttttagagacatcagaaggctgtagacaaatactgggacagctacaaccatcccttcagacaggatcagaagaacttagatcattatataatacaatagcagtcctctattgtgtgcatcaaaggatagatgtaaaagacaccaaggaagccttagataagatagaggaagagcaaaacaaaagtaagaaaaaggcacagcaagcagcagctgacacaggaaacaacagccaggtcagccaaaattaccctatagtgcagaacctccaggggcaaatggtacatcaggccatatcacctagaactttaaatgcatgggtaaaagtagtagaagagaaggctttcagcccagaagtaatacccatgttttcagcattatcagaaggagccaccccacaagatttaaataccatgctaaacacagtggggggacatcaagcagccatgcaaatgttaaaagagaccatcaatgaggaagctgcagaatgggatagattgcatccagtgcatgcagggcctaccgtccatgaagggttcgattggacccgcccggacgctcatatggcaacggcagattcgttagttcaattaggaataccacatcctgcagggttaaaacagaaaaaatcagtaacagtactggatgtgggcgatgcatatttttcagttcccttagataaagacttcaggaagtatactgcatttaccatacctagtataaacaatgagacaccagggattagatatcagtacaatgtgcttccacagggatggaaaggatcaccagcaatattccagtgtagcatgacaaaaatcttagagccttttagaaaacaaaatccagacatagtcatctatcaatacatggatgatttgtatgtaggatctgacttagaaatagggcagcatagaacaaaaatagaggaactgagacaacatctgttgaggtggggatttaccacaccagacaaaaaacatcagaaagaacctccattcctttggatgggttatgaactccatcctgataaatggacagtacagcctatagtgctgccagaaaaggacagctggactgtcaatgacatacagaaattagtgggaaaattgaattgggcaagtcagatttatgcagggattaaagtaaggcaattatgtaaacttcttaggggaaccaaagcactaacagaagtagtaccactaacagaagaagcagagctagaactggcagaaaacagggagattctaaaagaaccggtacatggagtgtattatgacccatcaaaagacttaatagcagaaatacagaagcaggggcaaggccaatggacatatcaaatttatcaagagccatttaaaaatctgaaaacaggaaagtatgcaagaatgaagggtgcccacactaatgatgtgaaacaattaacagaggcagtacaaaaaatagccacagaaagcatagtaatatggggaaagactcctaaatttaaattacccatacaaaaggaaacatgggaagcatggtggacagagtattggcaagccacctggattcctgagtgggagtttgtcaatacccctcccttagtgaagttatggtaccagttagagaaagaacccataataggagcagaaactttctatgtagatggggcagccaatagggaaactaaattaggaaaagcaggatatgtaactgacagaggaagacaaaaagttgtccccctaacggacacaacaaatcagaagactgagttacaagcaattcatctagctttgcaggattcgggattagaagtaaacatagtgacagactcacaatatgcattgggaatcattcaagcacaaccagataagagtgaatcagagttagtcagtcaaataatagagcagttaataaaaaaggaaaaagtctacctggcatgggtaccagcacacaaaggaattggaggaaatgaacaagtagataaattggtcagtgctggaatcaggaaagtactatttttagatggaatagataaggcccaagaagaacatgagaaatatcacagtaattggagagcaatggctagtgattttaacctaccacctgtagtagcaaaagaaatagtagccagctgtgataaatgtcagctaaaaggggaagccatgcatggacaagtagactgtagcccaggaatatggcagctagattgtacacatttagaaggaaaagttatcttggtagcagttcatgtagccagtggatatatagaagcagaagtaattccagcagagacagggcaagaaacagcatacttcctcttaaaattagcaggaagatggccagtaaaaacagtacatacagacaatggcagcaatttcaccagtactacagttaaggccgcctgttggtgggcggggatcaagcaggaatttggcattccctacaatccccaaagtcaaggagtaatagaatctatgaataaagaattaaagaaaattataggacaggtaagagatcaggctgaacatcttaagacagcagtacaaatggcagtattcatccacaattttaaaagaaaaggggggattggggggtacagtgcaggggaaagaatagtagacataatagcaacagacatacaaactaaagaattacaaaaacaaattacaaaaattcaaaattttcgggtttattacagggacagcagagatccagtttggaaaggaccagcaaagctcctctggaaaggtgaaggggcagtagtaatacaagataatagtgacataaaagtagtgccaagaagaaaagcaaagatcatcagggattaaccgtccatgaagggttcgattatctgtagccaacattcgatatggcaacggcagattcgttggagatgggggtggaaatggggcaccatgctccttgggatattgatgatctgtagtgctacagaaaaattgtgggtcacagtctattatggggtacctgtgtggaaggaagcaaccaccactctattttgtgcatcagatgctaaagcatatgatacagaggtacataatgtttgggccacacatgcctgtgtacccacagaccccaacccacaagaagtagtattggtaaatgtgacagaaaattttaacatgtggaaaaatgacatggtagaacagatgcatgaggatataatcagtttatgggatcaaagcctaaagccatgtgtaaaattaaccccactctgtgttagtttaaagtgcactgatttgaagaatgatactaataccaatagtagtagcgggagaatgataatggagaaaggagagataaaaaactgctctttcaatatcagcacaagcataagagataaggtgcagaaagaatatgcattcttttataaacttgatatagtaccaatagataataccagctataggttgataagttgtaacacctcagtcattacacaggcctgtccaaaggtatcctttgagccaattcccatacattattgtgccccggctggttttgcgattctaaaatgtaataataagacgttcaatggaacaggaccatgtacaaatgtcagcacagtacaatgtacacatggaatcaggccagtagtatcaactcaactgctgttaaatggcagtctagcagaagaagatgtagtaattagatctgccaatttcacagacaatgctaaaaccataatagtacagctgaacacatctgtagaaattaattgtacaagacccaacaacaatacaagaaaaagtatccgtatccagaggggaccagggagagcatttgttacaataggaaaaataggaaatatgagacaagcacattgtaacattagtagagcaaaatggaatgccactttaaaacagatagctagcaaattaagagaacaatttggaaataataaaacaataatctttaagcaatcctcaggaggggacccagaaattgtaacgcacagttttaattgtggaggggaatttttctactgtaattcaacacaactgtttaatagtacttggtttaatagtacttggagtactgaagggtcaaataacactgaaggaagtgacacaatcacactcccatgcagaataaaacaatttataaacatgtggcaggaagtaggaaaagcaatgtatgcccctcccatcagtggacaaattagatgttcatcaaatattactgggctgctattaacaagagatggtggtaataacaacaatgggtccgagatcttcagacctggaggaggcgatatgagggacaattggagaagtgaattatataaatataaagtagtaaaaattgaaccattaggagtagcacccaccaaggcaaagagaagagtggtgcagagagaaaaaagagcagtgggaataggagctttgttccttgggttcttgggagcagcaggaagcactatgggcgcagcgtcaatgacgctgacggtacaggccagacaattattgtctgatatagtgcagcagcagaacaatttgctgagggctattgaggcgcaacagcatctgttgcaactcacagtctggggcatcaaacagctccaggcaagaatcctggctgtggaaagatacctaaaggatcaacagctcctggggatttggggttgctctggaaaactcatttgcaccactgctgtgccttggaatgctagttggagtaataaatctctggaacagatttggaataacatgacctggatggagtgggacagagaaattaacaattacacaagcttaatacactccttaattgaagaatcgcaaaaccagcaagaaaagaatgaacaagaattattggaattagataaatgggcaagtttgtggaattggtttaacataacaaattggctgtggtatataaaattattcataatgatagtaggaggcttggtaggtttaagaatagtttttgctgtactttctatagtgaatagagttaggcagggatattcaccattatcgtttcagacccacctcccaatcccgaggggacccgacaggcccgaaggaatagaagaagaaggtggagagagagacagagacagatccattcgattagtgaacggatccttagcacttatctgggacgatctgcggagcctgtgcctcttcagctaccaccgcttgagagacttactcttgattgtaacgaggattgtggaacttctgggacgcagggggtgggaagccctcaaatattggtggaatctcctacagtattggagtcaggaactaaagaatagtgctgttaacttgctcaatgccacagccatagcagtagctgaggggacagatagggttatagaagtattacaagcagcttatagagctattcgccacatacctagaagaataagacagggcttggaaaggattttgctataagatgggtggcaagtggtcaaaaagtagtgtgattggatggcctgctgtaagggaaagaatgagacgagctgagccagcagcagatggggtgggagcagtatctcgagacctagaaaaacatggagcaatcacaagtagcaatacagcagctaacaatgctgcttgtgcctggctagaagcacaagaggaggaagaggtgggttttccagtcacacctcaggtacctttaagaccaatgacttacaaggcagctgtagatcttagccactttttaaaagaaaaggggggactggaagggctaattcactcccaaagaagacaagatatccttgatctgtggatctaccacacacaaggctacttccctgattggcagaactacacaccagggccaggggtcagatatccactgacctttggatggtgctacaagctagtaccagttgagccagataaggtagaagaggccaataaaggagagaacaccagcttgttacaccctgtgagcctgcatggaatggatgaccctgagagagaagtgttagagtggaggtttgacagccgcctagcatttcatcacgtggcccgagagctgcatccggagtacttcaagaactgctgacatcgagcttgctacaagggactttccgctggggactttccagggaggcgtggcctgggcgggactggggagtggcgagccctcagatgctgcatataagcagctgctttttgcctgtactgggtctctctggttagaccagatctgagcctgggagctctctggctaactagggaacccactgcttaagcctcaataaagcttgccttgagtgcttcaagtagtgtgtgcccgtctgttgtgtgactctggtaactagagatccctcagacccttttagtcagtgtggaaaatctctagca

SEQ ID NO: 85 - DNA, 7487 bp, Artificial Sequence
  Synthetic Sequence
tggaagggctaatttggtcccaaaaaagacaagagatccttgatctgtggatctaccacacacaaggctacttccctgattggcagaactacacaccagggccagggatcagatatccactgacctttggatggtgcttcaagttagtaccagttgaaccagagcaagtagaagaggccaatgaaggagagaacaacagcttgttacaccctatgagccagcatgggatggaggacccggagggagaagtattagtgtggaagtttgacagcctcctagcatttcgtcacatggcccgagagctgcatccggagtactacaaagactgctgacatcgagctttctacaagggactttccgctggggactttccagggaggtgtggcctgggcgggactggggagtggcgagccctcagatgctacatataagcagctgctttttgcctgtactgggtctctctggttagaccagatctgagcctgggagctctctggctaactagggaacccactgcttaagcctcaataaagcttgccttgagtgctcaaagtagtgtgtgcccgtctgttgtgtgactctggtaactagagatccctcagacccttttagtcagtgtggaaaatctctagcagtggcgcccgaacagggacttgaaagcgaaagtaaagccagaggagatctctcgacgcaggactcggcttgctgaagcgcgcacggcaagaggcgaggggcggcgactggtgagtacgccaaaaattttgactagcggaggctagaaggagagagatgggtgcgagagcgtcggtattaagcgggggagaattagataaatgggaaaaaattcggttaaggccagggggaaagaaacaatataaactaaaacatatagtatgggcaagcagggagctagaacgattcgcagttaatcctggccttttagagacatcagaaggctgtagacaaatactgggacagctacaaccatcccttcagacaggatcagaagaacttagatcattatataatacaatagcagtcctctattgtgtgcatcaaaggatagatgtaaaagacaccaaggaagccttagataagatagaggaagagcaaaacaaaagtaagaaaaaggcacagcaagcagcagctgacacaggaaacaacagccaggtcagccaaaattaccctatagtgcagaacctccaggggcaaatggtacatcaggccatatcacctagaactttaaatgcatgggtaaaagtagtagaagagaaggctttcagcccagaagtaatacccatgttttcagcattatcagaaggagccaccccacaagatttaaataccatgctaaacacagtggggggacatcaagcagccatgcaaatgttaaaagagaccatcaatgaggaagctgcagaatgggatagattgcatccagtgcatgcagggcctaccgtccatgaagggttcgattggacccgcccggacgctcatatggcaacggcagattcgttagttcaattaggaataccacatcctgcagggttaaaacagaaaaaatcagtaacagtactggatgtgggcgatgcatatttttcagttcccttagataaagacttcaggaagtatactgcatttaccatacctagtataaacaatgagacaccagggattagatatcagtacaatgtgcttccacagggatggaaaggatcaccagcaatattccagtgtagcatgacaaaaatcttagagccttttagaaaacaaaatccagacatagtcatctatcaatacatggatgatttgtatgtaggatctgacttagaaatagggcagcatagaacaaaaatagaggaactgagacaacatctgttgaggtggggatttaccacaccagacaaaaaacatcagaaagaacctccattcctttggatgggttatgaactccatcctgataaatggacagtacagcctatagtgctgccagaaaaggacagctggactgtcaatgacatacagaaattagtgggaaaattgaattgggcaagtcagatttatgcagggattaaagtaaggcaattatgtaaacttcttaggggaaccaaagcactaacagaagtagtaccactaacagaagaagcagagctagaactggcagaaaacagggagattctaaaagaaccggtacatggagtgtattatgacccatcaaaagacttaatagcagaaatacagaagcaggggcaaggccaatggacatatcaaatttatcaagagccatttaaaaatctgaaaacaggaaagtatgcaagaatgaacgaatctgccgttgccatatacagcatctgaacaagctgatcgaacccttcatggacggttaaggccgcctgttggtgggcggggatcaagcaggaatttggcattccctacaatccccaaagtcaaggagtaatagaatctatgaataaagaattaaagaaaattataggacaggtaagagatcaggctgaacatcttaagacagcagtacaaatggcagtattcatccacaattttaaaagaaaaggggggattggggggtacagtgcaggggaaagaatagtagacataatagcaacagacatacaaactaaagaattacaaaaacaaattacaaaaattcaaaattttcgggtttattacagggacagcagagatccagtttggaaaggaccagcaaagctcctctggaaaggtgaaggggcagtagtaatacaagataatagtgacataaaagtagtgccaagaagaaaagcaaagatcatcagggattatggaaaacagatggcaggtgatgattgtgtggcaagtagacaggatgaggattaacacatggaaaagattagtaaaacaccatatgtatatttcaaggaaagctaaggactggttttatagacatcactatgaaagtactaatccaaaaataagttcagaagtacacatcccactaggggatgctaaattagtaataacaacatattggggtctgcatacaggagaaagagactggcatttgggtcagggagtctccatagaatggaggaaaaagagatatagcacacaagtagaccctgacctagcagaccaactaattcatctgcactattttgattgtttttcagaatctgctataagaaataccatattaggacgtatagttagtcctaggtgtgaatatcaagcaggacataacaaggtaggatctctacagtacttggcactagcagcattaataaaaccaaaacagataaagccacctttgcctagtgttaggaaactgacagaggacagatggaacaagccccagaagaccaagggccacagagggagccatacaatgaatggacactagagcttttagaggaacttaagagtgaagctgttagacattttcctaggatatggctccataacttaggacaacatatctatgaaacttacggggatacttgggcaggagtggaagccataataagaattctgcaacaactgctgtttatccatttcagaattgggtgtcgacatagcagaataggcgttactcgacagaggagagcaagaaatggagccagtagatcctagactagagccctggaagcatccaggaagtcagcctaaaactgcttgtaccaattgctattgtaaaaagtgttgctttcattgccaagtttgtttcatgacaaaagccttaggcatctcctatggcaggaagaagcggagacagcgacgaagagctcatcagaacagtcagactcatcaagcttctctatcaaagcagtaagtagtacatgtaatgcaacctataatagtagcaatagtagcattagtagtagcaataataatagcaatagttgtgtggtccatagtaatcatagaatataggaaaatattaagacaaagaaaaatagacaggttaattgatagactaatagaaagagcagaagacagtggcaatgagagtgaaggagaagtatcagcacttgtggagatgggggtggaaatggggcaccatgctccttgggatattgatgatctgtagtgctacagaaaaattgtgggtcacagtctattatggggtacctgtgtggaaggaagcaaccaccactctattttgtgcatcagatgctaaagcatatgatacagaggtacataatgtttgggccacacatgcctgtgtacccacagaccccaacccacaagaagtagtattggtaaatgtgacagaaaattttaacatgtggaaaaatgacatggtagaacagatgcatgaggatataatcagtttatgggatcaaagcctaaagccatgtgtaaaattaaccccactctgtgttagtttaaagtgcactgatttgaagaatgatactaataccaatagtagtagcgggagaatgataatggagaaaggagagataaaaaactgctctttcaatatcagcacaagcataagagataaggtgcagaaagaatatgcattcttttataaacttgatatagtaccaatagataataccagctataggttgataagttgtaacacctcagtcattacacaggcctgtccaaaggtatcctttgagccaattcccatacattattgtgccccggctggttttgcgattctaaaatgtaataataagacgttcaatggaacaggaccatgtacaaatgtcagcacagtacaatgtacacatggaatcaggccagtagtatcaactcaactgctgttaaatggcagtctagcagaagaagatgtagtaattagatctgccaatttcacagacaatgctaaaaccataatagtacagctgaacacatctgtagaaattaattgtacaagacccaacaacaatacaagaaaaagtatccgtatccagaggggaccagggagagcatttgttacaataggaaaaataggaaatatgagacaagcacattgtaacattagtagagcaaaatggaatgccactttaaaacagatagctagcaaattaagagaacaatttggaaataataaaacaataatctttaagcaatcctcaggaggggacccagaaattgtaacgcacagttttaattgtggaggggaatttttctactgtaattcaacacaactgtttaatagtacttggtttaatagtacttggagtactgaagggtcaaataacactgaaggaagtgacacaatcacactcccatgcagaataaaacaatttataaacatgtggcaggaagtaggaaaagcaatgtatgcccctcccatcagtggacaaattagatgttcatcaaatattactgggctgctattaacaagagatggtggtaataacaacaatgggtccgagatcttcagacctggaggaggcgatatgagggacaattggagaagtgaattatataaatataaagtagtaaaaattgaaccattaggagtagcacccaccaaggcaaagagaagagtggtgcagagagaaaaaagagcagtgggaataggagctttgttccttgggttcttgggagcagcaggaagcactatgggcgcagcgtcaatgacgctgacggtacaggccagacaattattgtctgatatagtgcagcagcagaacaatttgctgagggctattgaggcgcaacagcatctgttgcaactcacagtctggggcatcaaacagctccaggcaagaatcctggctgtggaaagatacctaaaggatcaacagctcctggggatttggggttgctctggaaaactcatttgcaccactgctgtgccttggaatgctagttggagtaataaatctctggaacagatttggaataacatgacctggatggagtgggacagagaaattaacaattacacaagcttaatacactccttaattgaagaatcgcaaaaccagcaagaaaagaatgaacaagaattattggaattagataaatgggcaagtttgtggaattggtttaacataacaaattggctgtggtatataaaattattcataatgatagtaggaggcttggtaggtttaagaatagtttttgctgtactttctatagtgaatagagttaggcagggatattcaccattatcgtttcagacccacctcccaatcccgaggggacccgacaggcccgaaggaatagaagaagaaggtggagagagagacagagacagatccattcgattagtgaacggatccttagcacttatctgggacgatctgcggagcctgtgcctcttcagctaccaccgcttgagagacttactcttgattgtaacgaggattgtggaacttctgggacgcagggggtgggaagccctcaaatattggtggaatctcctacagtattggagtcaggaactaaagaatagtgctgttaacttgctcaatgccacagccatagcagtagctgaggggacagatagggttatagaagtattacaagcagcttatagagctattcgccacatacctagaagaataagacagggcttggaaaggattttgctataagatgggtggcaagtggtcaaaaagtagtgtgattggatggcctgctgtaagggaaagaatgagacgagctgagccagcagcagatggggtgggagcagtatctcgagacctagaaaaacatggagcaatcacaagtagcaatacagcagctaacaatgctgcttgtgcctggctagaagcacaagaggaggaagaggtgggttttccagtcacacctcaggtacctttaagaccaatgacttacaaggcagctgtagatcttagccactttttaaaagaaaaggggggactggaagggctaattcactcccaaagaagacaagatatccttgatctgtggatctaccacacacaaggctacttccctgattggcagaactacacaccagggccaggggtcagatatccactgacctttggatggtgctacaagctagtaccagttgagccagataaggtagaagaggccaataaaggagagaacaccagcttgttacaccctgtgagcctgcatggaatggatgaccctgagagagaagtgttagagtggaggtttgacagccgcctagcatttcatcacgtggcccgagagctgcatccggagtacttcaagaactgctgacatcgagcttgctacaagggactttccgctggggactttccagggaggcgtggcctgggcgggactggggagtggcgagccctcagatgctgcatataagcagctgctttttgcctgtactgggtctctctggttagaccagatctgagcctgggagctctctggctaactagggaacccactgcttaagcctcaataaagcttgccttgagtgcttcaagtagtgtgtgcccgtctgttgtgtgactctggtaactagagatccctcagacccttttagtcagtgtggaaaatctctagca

SEQ ID NO: 86 - DNA, 6564 bp, Artificial Sequence
  Synthetic Sequence
tggaagggctaatttggtcccaaaaaagacaagagatccttgatctgtggatctaccacacacaaggctacttccctgattggcagaactacacaccagggccagggatcagatatccactgacctttggatggtgcttcaagttagtaccagttgaaccagagcaagtagaagaggccaatgaaggagagaacaacagcttgttacaccctatgagccagcatgggatggaggacccggagggagaagtattagtgtggaagtttgacagcctcctagcatttcgtcacatggcccgagagctgcatccggagtactacaaagactgctgacatcgagctttctacaagggactttccgctggggactttccagggaggtgtggcctgggcgggactggggagtggcgagccctcagatgctacatataagcagctgctttttgcctgtactgggtctctctggttagaccagatctgagcctgggagctctctggctaactagggaacccactgcttaagcctcaataaagcttgccttgagtgctcaaagtagtgtgtgcccgtctgttgtgtgactctggtaactagagatccctcagacccttttagtcagtgtggaaaatctctagcagtggcgcccgaacagggacttgaaagcgaaagtaaagccagaggagatctctcgacgcaggactcggcttgctgaagcgcgcacggcaagaggcgaggggcggcgactggtgagtacgccaaaaattttgactagcggaggctagaaggagagagatgggtgcgagagcgtcggtattaagcgggggagaattagataaatgggaaaaaattcggttaaggccagggggaaagaaacaatataaactaaaacatatagtatgggcaagcagggagctagaacgattcgcagttaatcctggccttttagagacatcagaaggctgtagacaaatactgggacagctacaaccatcccttcagacaggatcagaagaacttagatcattatataatacaatagcagtcctctattgtgtgcatcaaaggatagatgtaaaagacaccaaggaagccttagataagatagaggaagagcaaaacaaaagtaagaaaaaggcacagcaagcagcagctgacacaggaaacaacagccaggtcagccaaaattaccctatagtgcagaacctccaggggcaaatggtacatcaggccatatcacctagaactttaaatgcatgggtaaaagtagtagaagagaaggctttcagcccagaagtaatacccatgttttcagcattatcagaaggagccaccccacaagatttaaataccatgctaaacacagtggggggacatcaagcagccatgcaaatgttaaaagagaccatcaatgaggaagctgcagaatgggatagattgcatccagtgcatgcagggcctaccgtccatgaagggttcgattggacccgcccggacgctcatatggcaacggcagattcgttagttcaattaggaataccacatcctgcagggttaaaacagaaaaaatcagtaacagtactggatgtgggcgatgcatatttttcagttcccttagataaagacttcaggaagtatactgcatttaccatacctagtataaacaatgagacaccagggattagatatcagtacaatgtgcttccacagggatggaaaggatcaccagcaatattccagtgtagcatgacaaaaatcttagagccttttagaaaacaaaatccagacatagtcatctatcaatacatggatgatttgtatgtaggatctgacttagaaatagggcagcatagaacaaaaatagaggaactgagacaacatctgttgaggtggggatttaccacaccagacaaaaaacatcagaaagaacctccattcctttggatgggttatgaactccatcctgataaatggacagtacagcctatagtgctgccagaaaaggacagctggactgtcaatgacatacagaaattagtgggaaaattgaattgggcaagtcagatttatgcagggattaaagtaaggcaattatgtaaacttcttaggggaaccaaagcactaacagaagtagtaccactaacagaagaagcagagctagaactggcagaaaacagggagattctaaaagaaccggtacatggagtgtattatgacccatcaaaagacttaatagcagaaatacagaagcaggggcaaggccaatggacatatcaaatttatcaagagccatttaaaaatctgaaaacaggaaagtatgcaagaatgaacgaatctgccgttgccatatacagcatctgaacaagctgatcgaacccttcatggacggttaaggccgcctgttggtgggcggggatcaagcaggaatttggcattccctacaatccccaaagtcaaggagtaatagaatctatgaataaagaattaaagaaaattataggacaggtaagagatcaggctgaacatcttaagacagcagtacaaatggcagtattcatccacaattttaaaagaaaaggggggattggggggtacagtgcaggggaaagaatagtagacataatagcaacagacatacaaactaaagaattacaaaaacaaattacaaaaattcaaaattttcgggtttattacagggacagcagagatccagtttggaaaggaccagcaaagctcctctggaaaggtgaaggggcagtagtaatacaagataatagtgacataaaagtagtgccaagaagaaaagcaaagatcatcagggattatggaaaacagatggcaggtgatgattgtgtggcccgtccatgaagggttcgattcttgaacagcgcggtctgttatggcaacggcagattcgtttaatgcaacctataatagtagcaatagtagcattagtagtagcaataataatagcaatagttgtgtggtccatagtaatcatagaatataggaaaatattaagacaaagaaaaatagacaggttaattgatagactaatagaaagagcagaagacagtggcaatgagagtgaaggagaagtatcagcacttgtggagatgggggtggaaatggggcaccatgctccttgggatattgatgatctgtagtgctacagaaaaattgtgggtcacagtctattatggggtacctgtgtggaaggaagcaaccaccactctattttgtgcatcagatgctaaagcatatgatacagaggtacataatgtttgggccacacatgcctgtgtacccacagaccccaacccacaagaagtagtattggtaaatgtgacagaaaattttaacatgtggaaaaatgacatggtagaacagatgcatgaggatataatcagtttatgggatcaaagcctaaagccatgtgtaaaattaaccccactctgtgttagtttaaagtgcactgatttgaagaatgatactaataccaatagtagtagcgggagaatgataatggagaaaggagagataaaaaactgctctttcaatatcagcacaagcataagagataaggtgcagaaagaatatgcattcttttataaacttgatatagtaccaatagataataccagctataggttgataagttgtaacacctcagtcattacacaggcctgtccaaaggtatcctttgagccaattcccatacattattgtgccccggctggttttgcgattctaaaatgtaataataagacgttcaatggaacaggaccatgtacaaatgtcagcacagtacaatgtacacatggaatcaggccagtagtatcaactcaactgctgttaaatggcagtctagcagaagaagatgtagtaattagatctgccaatttcacagacaatgctaaaaccataatagtacagctgaacacatctgtagaaattaattgtacaagacccaacaacaatacaagaaaaagtatccgtatccagaggggaccagggagagcatttgttacaataggaaaaataggaaatatgagacaagcacattgtaacattagtagagcaaaatggaatgccactttaaaacagatagctagcaaattaagagaacaatttggaaataataaaacaataatctttaagcaatcctcaggaggggacccagaaattgtaacgcacagttttaattgtggaggggaatttttctactgtaattcaacacaactgtttaatagtacttggtttaatagtacttggagtactgaagggtcaaataacactgaaggaagtgacacaatcacactcccatgcagaataaaacaatttataaacatgtggcaggaagtaggaaaagcaatgtatgcccctcccatcagtggacaaattagatgttcatcaaatattactgggctgctattaacaagagatggtggtaataacaacaatgggtccgagatcttcagacctggaggaggcgatatgagggacaattggagaagtgaattatataaatataaagtagtaaaaattgaaccattaggagtagcacccaccaaggcaaagagaagagtggtgcagagagaaaaaagagcagtgggaataggagctttgttccttgggttcttgggagcagcaggaagcactatgggcgcagcgtcaatgacgctgacggtacaggccagacaattattgtctgatatagtgcagcagcagaacaatttgctgagggctattgaggcgcaacagcatctgttgcaactcacagtctggggcatcaaacagctccaggcaagaatcctggctgtggaaagatacctaaaggatcaacagctcctggggatttggggttgctctggaaaactcatttgcaccactgctgtgccttggaatgctagttggagtaataaatctctggaacagatttggaataacatgacctggatggagtgggacagagaaattaacaattacacaagcttaatacactccttaattgaagaatcgcaaaaccagcaagaaaagaatgaacaagaattattggaattagataaatgggcaagtttgtggaattggtttaacataacaaattggctgtggtatataaaattattcataatgatagtaggaggcttggtaggtttaagaatagtttttgctgtactttctatagtgaatagagttaggcagggatattcaccattatcgtttcagacccacctcccaatcccgaggggacccgacaggcccgaaggaatagaagaagaaggtggagagagagacagagacagatccattcgattagtgaacggatccttagcacttatctgggacgatctgcggagcctgtgcctcttcagctaccaccgcttgagagacttactcttgattgtaacgaggattgtggaacttctgggacgcagggggtgggaagccctcaaatattggtggaatctcctacagtattggagtcaggaactaaagaatagtgctgttaacttgctcaatgccacagccatagcagtagctgaggggacagatagggttatagaagtattacaagcagcttatagagctattcgccacatacctagaagaataagacagggcttggaaaggattttgctataagatgggtggcaagtggtcaaaaagtagtgtgattggatggcctgctgtaagggaaagaatgagacgagctgagccagcagcagatggggtgggagcagtatctcgagacctagaaaaacatggagcaatcacaagtagcaatacagcagctaacaatgctgcttgtgcctggctagaagcacaagaggaggaagaggtgggttttccagtcacacctcaggtacctttaagaccaatgacttacaaggcagctgtagatcttagccactttttaaaagaaaaggggggactggaagggctaattcactcccaaagaagacaagatatccttgatctgtggatctaccacacacaaggctacttccctgattggcagaactacacaccagggccaggggtcagatatccactgacctttggatggtgctacaagctagtaccagttgagccagataaggtagaagaggccaataaaggagagaacaccagcttgttacaccctgtgagcctgcatggaatggatgaccctgagagagaagtgttagagtggaggtttgacagccgcctagcatttcatcacgtggcccgagagctgcatccggagtacttcaagaactgctgacatcgagcttgctacaagggactttccgctggggactttccagggaggcgtggcctgggcgggactggggagtggcgagccctcagatgctgcatataagcagctgctttttgcctgtactgggtctctctggttagaccagatctgagcctgggagctctctggctaactagggaacccactgcttaagcctcaataaagcttgccttgagtgcttcaagtagtgtgtgcccgtctgttgtgtgactctggtaactagagatccctcagacccttttagtcagtgtggaaaatctctagca

SEQ ID NO: 87 - DNA, 6339 bp, Artificial Sequence
  Synthetic Sequence
tggaagggctaatttggtcccaaaaaagacaagagatccttgatctgtggatctaccacacacaaggctacttccctgattggcagaactacacaccagggccagggatcagatatccactgacctttggatggtgcttcaagttagtaccagttgaaccagagcaagtagaagaggccaatgaaggagagaacaacagcttgttacaccctatgagccagcatgggatggaggacccggagggagaagtattagtgtggaagtttgacagcctcctagcatttcgtcacatggcccgagagctgcatccggagtactacaaagactgctgacatcgagctttctacaagggactttccgctggggactttccagggaggtgtggcctgggcgggactggggagtggcgagccctcagatgctacatataagcagctgctttttgcctgtactgggtctctctggttagaccagatctgagcctgggagctctctggctaactagggaacccactgcttaagcctcaataaagcttgccttgagtgctcaaagtagtgtgtgcccgtctgttgtgtgactctggtaactagagatccctcagacccttttagtcagtgtggaaaatctctagcagtggcgcccgaacagggacttgaaagcgaaagtaaagccagaggagatctctcgacgcaggactcggcttgctgaagcgcgcacggcaagaggcgaggggcggcgactggtgagtacgccaaaaattttgactagcggaggctagaaggagagagatgggtgcgagagcgtcggtattaagcgggggagaattagataaatgggaaaaaattcggttaaggccagggggaaagaaacaatataaactaaaacatatagtatgggcaagcagggagctagaacgattcgcagttaatcctggccttttagagacatcagaaggctgtagacaaatactgggacagctacaaccatcccttcagacaggatcagaagaacttagatcattatataatacaatagcagtcctctattgtgtgcatcaaaggatagatgtaaaagacaccaaggaagccttagataagatagaggaagagcaaaacaaaagtaagaaaaaggcacagcaagcagcagctgacacaggaaacaacagccaggtcagccaaaattaccctatagtgcagaacctccaggggcaaatggtacatcaggccatatcacctagaactttaaatgcatgggtaaaagtagtagaagagaaggctttcagcccagaagtaatacccatgttttcagcattatcagaaggagccaccccacaagatttaaataccatgctaaacacagtggggggacatcaagcagccatgcaaatgttaaaagagaccatcaatgaggaagctgcagaatgggatagattgcatccagtgcatgcagggcctaccgtccatgaagggttcgattggacccgcccggacgctcatatggcaacggcagattcgttagttcaattaggaataccacatcctgcagggttaaaacagaaaaaatcagtaacagtactggatgtgggcgatgcatatttttcagttcccttagataaagacttcaggaagtatactgcatttaccatacctagtataaacaatgagacaccagggattagatatcagtacaatgtgcttccacagggatggaaaggatcaccagcaatattccagtgtagcatgacaaaaatcttagagccttttagaaaacaaaatccagacatagtcatctatcaatacatggatgatttgtatgtaggatctgacttagaaatagggcagcatagaacaaaaatagaggaactgagacaacatctgttgaggtggggatttaccacaccagacaaaaaacatcagaaagaacctccattcctttggatgggttatgaactccatcctgataaatggacagtacagcctatagtgctgccagaaaaggacagctggactgtcaatgacatacagaaattagtgggaaaattgaattgggcaagtcagatttatgcagggattaaagtaaggcaattatgtaaacttcttaggggaaccaaagcactaacagaagtagtaccactaacagaagaagcagagctagaactggcagaaaacagggagattctaaaagaaccggtacatggagtgtattatgacccatcaaaagacttaatagcagaaatacagaagcaggggcaaggccaatggacatatcaaatttatcaagagccatttaaaaatctgaaaacaggaaagtatgcaagaatgaacgaatctgccgttgccatatacagcatctgaacaagctgatcgaacccttcatggacggttaaggccgcctgttggtgggcggggatcaagcaggaatttggcattccctacaatccccaaagtcaaggagtaatagaatctatgaataaagaattaaagaaaattataggacaggtaagagatcaggctgaacatcttaagacagcagtacaaatggcagtattcatccacaattttaaaagaaaaggggggattggggggtacagtgcaggggaaagaatagtagacataatagcaacagacatacaaactaaagaattacaaaaacaaattacaaaaattcaaaattttcgggtttattacagggacagcagagatccagtttggaaaggaccagcaaagctcctctggaaaggtgaaggggcagtagtaatacaagataatagtgacataaaagtagtgccaagaagaaaagcaaagatcatcagggattaaccgtccatgaagggttcgattatctgtagccaacattcgatatggcaacggcagattcgttggagatgggggtggaaatggggcaccatgctccttgggatattgatgatctgtagtgctacagaaaaattgtgggtcacagtctattatggggtacctgtgtggaaggaagcaaccaccactctattttgtgcatcagatgctaaagcatatgatacagaggtacataatgtttgggccacacatgcctgtgtacccacagaccccaacccacaagaagtagtattggtaaatgtgacagaaaattttaacatgtggaaaaatgacatggtagaacagatgcatgaggatataatcagtttatgggatcaaagcctaaagccatgtgtaaaattaaccccactctgtgttagtttaaagtgcactgatttgaagaatgatactaataccaatagtagtagcgggagaatgataatggagaaaggagagataaaaaactgctctttcaatatcagcacaagcataagagataaggtgcagaaagaatatgcattcttttataaacttgatatagtaccaatagataataccagctataggttgataagttgtaacacctcagtcattacacaggcctgtccaaaggtatcctttgagccaattcccatacattattgtgccccggctggttttgcgattctaaaatgtaataataagacgttcaatggaacaggaccatgtacaaatgtcagcacagtacaatgtacacatggaatcaggccagtagtatcaactcaactgctgttaaatggcagtctagcagaagaagatgtagtaattagatctgccaatttcacagacaatgctaaaaccataatagtacagctgaacacatctgtagaaattaattgtacaagacccaacaacaatacaagaaaaagtatccgtatccagaggggaccagggagagcatttgttacaataggaaaaataggaaatatgagacaagcacattgtaacattagtagagcaaaatggaatgccactttaaaacagatagctagcaaattaagagaacaatttggaaataataaaacaataatctttaagcaatcctcaggaggggacccagaaattgtaacgcacagttttaattgtggaggggaatttttctactgtaattcaacacaactgtttaatagtacttggtttaatagtacttggagtactgaagggtcaaataacactgaaggaagtgacacaatcacactcccatgcagaataaaacaatttataaacatgtggcaggaagtaggaaaagcaatgtatgcccctcccatcagtggacaaattagatgttcatcaaatattactgggctgctattaacaagagatggtggtaataacaacaatgggtccgagatcttcagacctggaggaggcgatatgagggacaattggagaagtgaattatataaatataaagtagtaaaaattgaaccattaggagtagcacccaccaaggcaaagagaagagtggtgcagagagaaaaaagagcagtgggaataggagctttgttccttgggttcttgggagcagcaggaagcactatgggcgcagcgtcaatgacgctgacggtacaggccagacaattattgtctgatatagtgcagcagcagaacaatttgctgagggctattgaggcgcaacagcatctgttgcaactcacagtctggggcatcaaacagctccaggcaagaatcctggctgtggaaagatacctaaaggatcaacagctcctggggatttggggttgctctggaaaactcatttgcaccactgctgtgccttggaatgctagttggagtaataaatctctggaacagatttggaataacatgacctggatggagtgggacagagaaattaacaattacacaagcttaatacactccttaattgaagaatcgcaaaaccagcaagaaaagaatgaacaagaattattggaattagataaatgggcaagtttgtggaattggtttaacataacaaattggctgtggtatataaaattattcataatgatagtaggaggcttggtaggtttaagaatagtttttgctgtactttctatagtgaatagagttaggcagggatattcaccattatcgtttcagacccacctcccaatcccgaggggacccgacaggcccgaaggaatagaagaagaaggtggagagagagacagagacagatccattcgattagtgaacggatccttagcacttatctgggacgatctgcggagcctgtgcctcttcagctaccaccgcttgagagacttactcttgattgtaacgaggattgtggaacttctgggacgcagggggtgggaagccctcaaatattggtggaatctcctacagtattggagtcaggaactaaagaatagtgctgttaacttgctcaatgccacagccatagcagtagctgaggggacagatagggttatagaagtattacaagcagcttatagagctattcgccacatacctagaagaataagacagggcttggaaaggattttgctataagatgggtggcaagtggtcaaaaagtagtgtgattggatggcctgctgtaagggaaagaatgagacgagctgagccagcagcagatggggtgggagcagtatctcgagacctagaaaaacatggagcaatcacaagtagcaatacagcagctaacaatgctgcttgtgcctggctagaagcacaagaggaggaagaggtgggttttccagtcacacctcaggtacctttaagaccaatgacttacaaggcagctgtagatcttagccactttttaaaagaaaaggggggactggaagggctaattcactcccaaagaagacaagatatccttgatctgtggatctaccacacacaaggctacttccctgattggcagaactacacaccagggccaggggtcagatatccactgacctttggatggtgctacaagctagtaccagttgagccagataaggtagaagaggccaataaaggagagaacaccagcttgttacaccctgtgagcctgcatggaatggatgaccctgagagagaagtgttagagtggaggtttgacagccgcctagcatttcatcacgtggcccgagagctgcatccggagtacttcaagaactgctgacatcgagcttgctacaagggactttccgctggggactttccagggaggcgtggcctgggcgggactggggagtggcgagccctcagatgctgcatataagcagctgctttttgcctgtactgggtctctctggttagaccagatctgagcctgggagctctctggctaactagggaacccactgcttaagcctcaataaagcttgccttgagtgcttcaagtagtgtgtgcccgtctgttgtgtgactctggtaactagagatccctcagacccttttagtcagtgtggaaaatctctagca

SEQ ID NO: 88 - DNA, 8225 bp, Artificial Sequence
  Synthetic Sequence
tggaagggctaatttggtcccaaaaaagacaagagatccttgatctgtggatctaccacacacaaggctacttccctgattggcagaactacacaccagggccagggatcagatatccactgacctttggatggtgcttcaagttagtaccagttgaaccagagcaagtagaagaggccaatgaaggagagaacaacagcttgttacaccctatgagccagcatgggatggaggacccggagggagaagtattagtgtggaagtttgacagcctcctagcatttcgtcacatggcccgagagctgcatccggagtactacaaagactgctgacatcgagctttctacaagggactttccgctggggactttccagggaggtgtggcctgggcgggactggggagtggcgagccctcagatgctacatataagcagctgctttttgcctgtactgggtctctctggttagaccagatctgagcctgggagctctctggctaactagggaacccactgcttaagcctcaataaagcttgccttgagtgctcaaagtagtgtgtgcccgtctgttgtgtgactctggtaactagagatccctcagacccttttagtcagtgtggaaaatctctagcagtggcgcccgaacagggacttgaaagcgaaagtaaagccagaggagatctctcgacgcaggactcggcttgctgaagcgcgcacggcaagaggcgaggggcggcgactggtgagtacgccaaaaattttgactagcggaggctagaaggagagagatgggtgcgagagcgtcggtattaagcgggggagaattagataaatgggaaaaaattcggttaaggccagggggaaagaaacaatataaactaaaacatatagtatgggcaagcagggagctagaacgattcgcagttaatcctggccttttagagacatcagaaggctgtagacaaatactgggacagctacaaccatcccttcagacaggatcagaagaacttagatcattatataatacaatagcagtcctctattgtgtgcatcaaaggatagatgtaaaagacaccaaggaagccttagataagatagaggaagagcaaaacaaaagtaagaaaaaggcacagcaagcagcagctgacacaggaaacaacagccaggtcagccaaaattaccctatagtgcagaacctccaggggcaaatggtacatcaggccatatcacctagaactttaaatgcatgggtaaaagtagtagaagagaaggctttcagcccagaagtaatacccatgttttcagcattatcagaaggagccaccccacaagatttaaataccatgctaaacacagtggggggacatcaagcagccatgcaaatgttaaaagagaccatcaatgaggaagctgcagaatgggatagattgcatccagtgcatgcaccgtccatgaagggttcgatcaggcagctcaagaaacacgtatggcaacggcagattcgttttccacagggatggaaaggatcaccagcaatattccagtgtagcatgacaaaaatcttagagccttttagaaaacaaaatccagacatagtcatctatcaatacatggatgatttgtatgtaggatctgacttagaaatagggcagcatagaacaaaaatagaggaactgagacaacatctgttgaggtggggatttaccacaccagacaaaaaacatcagaaagaacctccattcctttggatgggttatgaactccatcctgataaatggacagtacagcctatagtgctgccagaaaaggacagctggactgtcaatgacatacagaaattagtgggaaaattgaattgggcaagtcagatttatgcagggattaaagtaaggcaattatgtaaacttcttaggggaaccaaagcactaacagaagtagtaccactaacagaagaagcagagctagaactggcagaaaacagggagattctaaaagaaccggtacatggagtgtattatgacccatcaaaagacttaatagcagaaatacagaagcaggggcaaggccaatggacatatcaaatttatcaagagccatttaaaaatctgaaaacaggaaagtatgcaagaatgaagggtgcccacactaatgatgtgaaacaattaacagaggcagtacaaaaaatagccacagaaagcatagtaatatggggaaagactcctaaatttaaattacccatacaaaaggaaacatgggaagcatggtggacagagtattggcaagccacctggattcctgagtgggagtttgtcaatacccctcccttagtgaagttatggtaccagttagagaaagaacccataataggagcagaaactttctatgtagatggggcagccaatagggaaactaaattaggaaaagcaggatatgtaactgacagaggaagacaaaaagttgtccccctaacggacacaacaaatcagaagactgagttacaagcaattcatctagctttgcaggattcgggattagaagtaaacatagtgacagactcacaatatgcattgggaatcattcaagcacaaccagataagagtgaatcagagttagtcagtcaaataatagagcagttaataaaaaaggaaaaagtctacctggcatgggtaccagcacacaaaggaattggaggaaatgaacaagtagataaattggtcagtgctggaatcaggaaagtactatttttagatggaatagataaggcccaagaagaacatgagaaatatcacagtaattggagagcaatggctagtgattttaacctaccacctgtagtagcaaaagaaatagtagccagctgtgataaatgtcagctaaaaggggaagccatgcatggacaagtagactgtagcccaggaatatggcagctagattgtacacatttagaaggaaaagttatcttggtagcagttcatgtagccagtggatatatagaagcagaagtaattccagcagagacagggcaagaaacagcatacttcctcttaaaattagcaggaagatggccagtaaaaacagtacatacagacaatggcagcaatttcaccagtactacagttaaggccgcctgttggtgggcggggatcaagcaggaatttggcattccctacaatccccaaagtcaaggagtaatagaatctatgaataaagaattaaagaaaattataggacaggtaagagatcaggctgaacatcttaagacagcagtacaaatggcagtattcatccacaattttaaaagaaaaggggggattggggggtacagtgcaggggaaagaatagtagacataatagcaacagacatacaaactaaagaattacaaaaacaaattacaaaaattcaaaattttcgggtttattacagggacagcagagatccagtttggaaaggaccagcaaagctcctctggaaaggtgaaggggcagtagtaatacaagataatagtgacataaaagtagtgccaagaagaaaagcaaagatcatcagggattatggaaaacagatggcaggtgatgattgtgtggcaagtagacaggatgaggattaacacatggaaaagattagtaaaacaccatatgtatatttcaaggaaagctaaggactggttttatagacatcactatgaaagtactaatccaaaaataagttcagaagtacacatcccactaggggatgctaaattagtaataacaacatattggggtctgcatacaggagaaagagactggcatttgggtcagggagtctccatagaatggaggaaaaagagatatagcacacaagtagaccctgacctagcagaccaactaattcatctgcactattttgattgtttttcagaatctgctataagaaataccatattaggacgtatagttagtcctaggtgtgaatatcaagcaggacataacaaggtaggatctctacagtacttggcactagcagcattaataaaaccaaaacagataaagccacctttgcctagtgttaggaaactgacagaggacagatggaacaagccccagaagaccaagggccacagagggagccatacaatgaatggacactagagcttttagaggaacttaagagtgaagctgttagacattttcctaggatatggctccataacttaggacaacatatctatgaaacttacggggatacttgggcaggagtggaagccataataagaattctgcaacaactgctgtttatccatttcagaattgggtgtcgacatagcagaataggcgttactcgacagaggagagcaagaaatggagccagtagatcctagactagagccctggaagcatccaggaagtcagcctaaaactgcttgtaccaattgctattgtaaaaagtgttgctttcattgccaagtttgtttcatgacaaaagccttaggcatctcctatggcaggaagaagcggagacagcgacgaagagctcatcagaacagtcagactcatcaagcttctctatcaaagcagtaagtagtacatgtaatgcaacctataatagtagcaatagtagcattagtagtagcaataataatagcaatagttgtgtggtccatagtaatcatagaatataggaaaatattaagacaaagaaaaatagacaggttaattgatagactaatagaaagagcagaagacagtggcaatgagagtgaaggagaagtatcagcacttgtggagatgggggtggaaatggggcaccatgctccttgggatattgatgatctgtagtgctacagaaaaattgtgggtcacagtctattatggggtacctgtgtggaaggaagcaaccaccactctattttgtgcatcagatgctaaagcatatgatacagaggtacataatgtttgggccacacatgcctgtgtacccacagaccccaacccacaagaagtagtattggtaaatgtgacagaaaattttaacatgtggaaaaatgacatggtagaacagatgcatgaggatataatcagtttatgggatcaaagcctaaagccatgtgtaaaattaaccccactctgtgttagtttaaagtgcactgatttgaagaatgatactaataccaatagtagtagcgggagaatgataatggagaaaggagagataaaaaactgctctttcaatatcagcacaagcataagagataaggtgcagaaagaatatgcattcttttataaacttgatatagtaccaatagataataccagctataggttgataagttgtaacacctcagtcattacacaggcctgtccaaaggtatcctttgagccaattcccatacattattgtgccccggctggttttgcgattctaaaatgtaataataagacgttcaatggaacaggaccatgtacaaatgtcagcacagtacaatgtacacatggaatcaggccagtagtatcaactcaactgctgttaaatggcagtctagcagaagaagatgtagtaattagatctgccaatttcacagacaatgctaaaaccataatagtacagctgaacacatctgtagaaattaattgtacaagacccaacaacaatacaagaaaaagtatccgtatccagaggggaccagggagagcatttgttacaataggaaaaataggaaatatgagacaagcacattgtaacattagtagagcaaaatggaatgccactttaaaacagatagctagcaaattaagagaacaatttggaaataataaaacaataatctttaagcaatcctcaggaggggacccagaaattgtaacgcacagttttaattgtggaggggaatttttctactgtaattcaacacaactgtttaatagtacttggtttaatagtacttggagtactgaagggtcaaataacactgaaggaagtgacacaatcacactcccatgcagaataaaacaatttataaacatgtggcaggaagtaggaaaagcaatgtatgcccctcccatcagtggacaaattagatgttcatcaaatattactgggctgctattaacaagagatggtggtaataacaacaatgggtccgagatcttcagacctggaggaggcgatatgagggacaattggagaagtgaattatataaatataaagtagtaaaaattgaaccattaggagtagcacccaccaaggcaaagagaagagtggtgcagagagaaaaaagagcagtgggaataggagctttgttccttgggttcttgggagcagcaggaagcactatgggcgcagcgtcaatgacgctgacggtacaggccagacaattattgtctgatatagtgcagcagcagaacaatttgctgagggctattgaggcgcaacagcatctgttgcaactcacagtctggggcatcaaacagctccaggcaagaatcctggctgtggaaagatacctaaaggatcaacagctcctggggatttggggttgctctggaaaactcatttgcaccactgctgtgccttggaatgctagttggagtaataaatctctggaacagatttggaataacatgacctggatggagtgggacagagaaattaacaattacacaagcttaatacactccttaattgaagaatcgcaaaaccagcaagaaaagaatgaacaagaattattggaattagataaatgggcaagtttgtggaattggtttaacataacaaattggctgtggtatataaaattattcataatgatagtaggaggcttggtaggtttaagaatagtttttgctgtactttctatagtgaatagagttaggcagggatattcaccattatcgtttcagacccacctcccaatcccgaggggacccgacaggcccgaaggaatagaagaagaaggtggagagagagacagagacagatccattcgattagtgaacggatccttagcacttatctgggacgatctgcggagcctgtgcctcttcagctaccaccgcttgagagacttactcttgattgtaacgaggattgtggaacttctgggacgcagggggtgggaagccctcaaatattggtggaatctcctacagtattggagtcaggaactaaagaatagtgctgttaacttgctcaatgccacagccatagcagtagctgaggggacagatagggttatagaagtattacaagcagcttatagagctattcgccacatacctagaagaataagacagggcttggaaaggattttgctataagatgggtggcaagtggtcaaaaagtagtgtgattggatggcctgctgtaagggaaagaatgagacgagctgagccagcagcagatggggtgggagcagtatctcgagacctagaaaaacatggagcaatcacaagtagcaatacagcagctaacaatgctgcttgtgcctggctagaagcacaagaggaggaagaggtgggttttccagtcacacctcaggtacctttaagaccaatgacttacaaggcagctgtagatcttagccactttttaaaagaaaaggggggactggaagggctaattcactcccaaagaagacaagatatccttgatctgtggatctaccacacacaaggctacttccctgattggcagaactacacaccagggccaggggtcagatatccactgacctttggatggtgctacaagctagtaccagttgagccagataaggtagaagaggccaataaaggagagaacaccagcttgttacaccctgtgagcctgcatggaatggatgaccctgagagagaagtgttagagtggaggtttgacagccgcctagcatttcatcacgtggcccgagagctgcatccggagtacttcaagaactgctgacatcgagcttgctacaagggactttccgctggggactttccagggaggcgtggcctgggcgggactggggagtggcgagccctcagatgctgcatataagcagctgctttttgcctgtactgggtctctctggttagaccagatctgagcctgggagctctctggctaactagggaacccactgcttaagcctcaataaagcttgccttgagtgcttcaagtagtgtgtgcccgtctgttgtgtgactctggtaactagagatccctcagacccttttagtcagtgtggaaaatctctagca

SEQ ID NO: 89 - DNA, 7302 bp, Artificial Sequence
  Synthetic Sequence
tggaagggctaatttggtcccaaaaaagacaagagatccttgatctgtggatctaccacacacaaggctacttccctgattggcagaactacacaccagggccagggatcagatatccactgacctttggatggtgcttcaagttagtaccagttgaaccagagcaagtagaagaggccaatgaaggagagaacaacagcttgttacaccctatgagccagcatgggatggaggacccggagggagaagtattagtgtggaagtttgacagcctcctagcatttcgtcacatggcccgagagctgcatccggagtactacaaagactgctgacatcgagctttctacaagggactttccgctggggactttccagggaggtgtggcctgggcgggactggggagtggcgagccctcagatgctacatataagcagctgctttttgcctgtactgggtctctctggttagaccagatctgagcctgggagctctctggctaactagggaacccactgcttaagcctcaataaagcttgccttgagtgctcaaagtagtgtgtgcccgtctgttgtgtgactctggtaactagagatccctcagacccttttagtcagtgtggaaaatctctagcagtggcgcccgaacagggacttgaaagcgaaagtaaagccagaggagatctctcgacgcaggactcggcttgctgaagcgcgcacggcaagaggcgaggggcggcgactggtgagtacgccaaaaattttgactagcggaggctagaaggagagagatgggtgcgagagcgtcggtattaagcgggggagaattagataaatgggaaaaaattcggttaaggccagggggaaagaaacaatataaactaaaacatatagtatgggcaagcagggagctagaacgattcgcagttaatcctggccttttagagacatcagaaggctgtagacaaatactgggacagctacaaccatcccttcagacaggatcagaagaacttagatcattatataatacaatagcagtcctctattgtgtgcatcaaaggatagatgtaaaagacaccaaggaagccttagataagatagaggaagagcaaaacaaaagtaagaaaaaggcacagcaagcagcagctgacacaggaaacaacagccaggtcagccaaaattaccctatagtgcagaacctccaggggcaaatggtacatcaggccatatcacctagaactttaaatgcatgggtaaaagtagtagaagagaaggctttcagcccagaagtaatacccatgttttcagcattatcagaaggagccaccccacaagatttaaataccatgctaaacacagtggggggacatcaagcagccatgcaaatgttaaaagagaccatcaatgaggaagctgcagaatgggatagattgcatccagtgcatgcaccgtccatgaagggttcgatcaggcagctcaagaaacacgtatggcaacggcagattcgttttccacagggatggaaaggatcaccagcaatattccagtgtagcatgacaaaaatcttagagccttttagaaaacaaaatccagacatagtcatctatcaatacatggatgatttgtatgtaggatctgacttagaaatagggcagcatagaacaaaaatagaggaactgagacaacatctgttgaggtggggatttaccacaccagacaaaaaacatcagaaagaacctccattcctttggatgggttatgaactccatcctgataaatggacagtacagcctatagtgctgccagaaaaggacagctggactgtcaatgacatacagaaattagtgggaaaattgaattgggcaagtcagatttatgcagggattaaagtaaggcaattatgtaaacttcttaggggaaccaaagcactaacagaagtagtaccactaacagaagaagcagagctagaactggcagaaaacagggagattctaaaagaaccggtacatggagtgtattatgacccatcaaaagacttaatagcagaaatacagaagcaggggcaaggccaatggacatatcaaatttatcaagagccatttaaaaatctgaaaacaggaaagtatgcaagaatgaagggtgcccacactaatgatgtgaaacaattaacagaggcagtacaaaaaatagccacagaaagcatagtaatatggggaaagactcctaaatttaaattacccatacaaaaggaaacatgggaagcatggtggacagagtattggcaagccacctggattcctgagtgggagtttgtcaatacccctcccttagtgaagttatggtaccagttagagaaagaacccataataggagcagaaactttctatgtagatggggcagccaatagggaaactaaattaggaaaagcaggatatgtaactgacagaggaagacaaaaagttgtccccctaacggacacaacaaatcagaagactgagttacaagcaattcatctagctttgcaggattcgggattagaagtaaacatagtgacagactcacaatatgcattgggaatcattcaagcacaaccagataagagtgaatcagagttagtcagtcaaataatagagcagttaataaaaaaggaaaaagtctacctggcatgggtaccagcacacaaaggaattggaggaaatgaacaagtagataaattggtcagtgctggaatcaggaaagtactatttttagatggaatagataaggcccaagaagaacatgagaaatatcacagtaattggagagcaatggctagtgattttaacctaccacctgtagtagcaaaagaaatagtagccagctgtgataaatgtcagctaaaaggggaagccatgcatggacaagtagactgtagcccaggaatatggcagctagattgtacacatttagaaggaaaagttatcttggtagcagttcatgtagccagtggatatatagaagcagaagtaattccagcagagacagggcaagaaacagcatacttcctcttaaaattagcaggaagatggccagtaaaaacagtacatacagacaatggcagcaatttcaccagtactacagttaaggccgcctgttggtgggcggggatcaagcaggaatttggcattccctacaatccccaaagtcaaggagtaatagaatctatgaataaagaattaaagaaaattataggacaggtaagagatcaggctgaacatcttaagacagcagtacaaatggcagtattcatccacaattttaaaagaaaaggggggattggggggtacagtgcaggggaaagaatagtagacataatagcaacagacatacaaactaaagaattacaaaaacaaattacaaaaattcaaaattttcgggtttattacagggacagcagagatccagtttggaaaggaccagcaaagctcctctggaaaggtgaaggggcagtagtaatacaagataatagtgacataaaagtagtgccaagaagaaaagcaaagatcatcagggattatggaaaacagatggcaggtgatgattgtgtggcccgtccatgaagggttcgattcttgaacagcgcggtctgttatggcaacggcagattcgtttaatgcaacctataatagtagcaatagtagcattagtagtagcaataataatagcaatagttgtgtggtccatagtaatcatagaatataggaaaatattaagacaaagaaaaatagacaggttaattgatagactaatagaaagagcagaagacagtggcaatgagagtgaaggagaagtatcagcacttgtggagatgggggtggaaatggggcaccatgctccttgggatattgatgatctgtagtgctacagaaaaattgtgggtcacagtctattatggggtacctgtgtggaaggaagcaaccaccactctattttgtgcatcagatgctaaagcatatgatacagaggtacataatgtttgggccacacatgcctgtgtacccacagaccccaacccacaagaagtagtattggtaaatgtgacagaaaattttaacatgtggaaaaatgacatggtagaacagatgcatgaggatataatcagtttatgggatcaaagcctaaagccatgtgtaaaattaaccccactctgtgttagtttaaagtgcactgatttgaagaatgatactaataccaatagtagtagcgggagaatgataatggagaaaggagagataaaaaactgctctttcaatatcagcacaagcataagagataaggtgcagaaagaatatgcattcttttataaacttgatatagtaccaatagataataccagctataggttgataagttgtaacacctcagtcattacacaggcctgtccaaaggtatcctttgagccaattcccatacattattgtgccccggctggttttgcgattctaaaatgtaataataagacgttcaatggaacaggaccatgtacaaatgtcagcacagtacaatgtacacatggaatcaggccagtagtatcaactcaactgctgttaaatggcagtctagcagaagaagatgtagtaattagatctgccaatttcacagacaatgctaaaaccataatagtacagctgaacacatctgtagaaattaattgtacaagacccaacaacaatacaagaaaaagtatccgtatccagaggggaccagggagagcatttgttacaataggaaaaataggaaatatgagacaagcacattgtaacattagtagagcaaaatggaatgccactttaaaacagatagctagcaaattaagagaacaatttggaaataataaaacaataatctttaagcaatcctcaggaggggacccagaaattgtaacgcacagttttaattgtggaggggaatttttctactgtaattcaacacaactgtttaatagtacttggtttaatagtacttggagtactgaagggtcaaataacactgaaggaagtgacacaatcacactcccatgcagaataaaacaatttataaacatgtggcaggaagtaggaaaagcaatgtatgcccctcccatcagtggacaaattagatgttcatcaaatattactgggctgctattaacaagagatggtggtaataacaacaatgggtccgagatcttcagacctggaggaggcgatatgagggacaattggagaagtgaattatataaatataaagtagtaaaaattgaaccattaggagtagcacccaccaaggcaaagagaagagtggtgcagagagaaaaaagagcagtgggaataggagctttgttccttgggttcttgggagcagcaggaagcactatgggcgcagcgtcaatgacgctgacggtacaggccagacaattattgtctgatatagtgcagcagcagaacaatttgctgagggctattgaggcgcaacagcatctgttgcaactcacagtctggggcatcaaacagctccaggcaagaatcctggctgtggaaagatacctaaaggatcaacagctcctggggatttggggttgctctggaaaactcatttgcaccactgctgtgccttggaatgctagttggagtaataaatctctggaacagatttggaataacatgacctggatggagtgggacagagaaattaacaattacacaagcttaatacactccttaattgaagaatcgcaaaaccagcaagaaaagaatgaacaagaattattggaattagataaatgggcaagtttgtggaattggtttaacataacaaattggctgtggtatataaaattattcataatgatagtaggaggcttggtaggtttaagaatagtttttgctgtactttctatagtgaatagagttaggcagggatattcaccattatcgtttcagacccacctcccaatcccgaggggacccgacaggcccgaaggaatagaagaagaaggtggagagagagacagagacagatccattcgattagtgaacggatccttagcacttatctgggacgatctgcggagcctgtgcctcttcagctaccaccgcttgagagacttactcttgattgtaacgaggattgtggaacttctgggacgcagggggtgggaagccctcaaatattggtggaatctcctacagtattggagtcaggaactaaagaatagtgctgttaacttgctcaatgccacagccatagcagtagctgaggggacagatagggttatagaagtattacaagcagcttatagagctattcgccacatacctagaagaataagacagggcttggaaaggattttgctataagatgggtggcaagtggtcaaaaagtagtgtgattggatggcctgctgtaagggaaagaatgagacgagctgagccagcagcagatggggtgggagcagtatctcgagacctagaaaaacatggagcaatcacaagtagcaatacagcagctaacaatgctgcttgtgcctggctagaagcacaagaggaggaagaggtgggttttccagtcacacctcaggtacctttaagaccaatgacttacaaggcagctgtagatcttagccactttttaaaagaaaaggggggactggaagggctaattcactcccaaagaagacaagatatccttgatctgtggatctaccacacacaaggctacttccctgattggcagaactacacaccagggccaggggtcagatatccactgacctttggatggtgctacaagctagtaccagttgagccagataaggtagaagaggccaataaaggagagaacaccagcttgttacaccctgtgagcctgcatggaatggatgaccctgagagagaagtgttagagtggaggtttgacagccgcctagcatttcatcacgtggcccgagagctgcatccggagtacttcaagaactgctgacatcgagcttgctacaagggactttccgctggggactttccagggaggcgtggcctgggcgggactggggagtggcgagccctcagatgctgcatataagcagctgctttttgcctgtactgggtctctctggttagaccagatctgagcctgggagctctctggctaactagggaacccactgcttaagcctcaataaagcttgccttgagtgcttcaagtagtgtgtgcccgtctgttgtgtgactctggtaactagagatccctcagacccttttagtcagtgtggaaaatctctagca

SEQ ID NO: 90 - DNA, 7077 bp, Artificial Sequence
  Synthetic Sequence
tggaagggctaatttggtcccaaaaaagacaagagatccttgatctgtggatctaccacacacaaggctacttccctgattggcagaactacacaccagggccagggatcagatatccactgacctttggatggtgcttcaagttagtaccagttgaaccagagcaagtagaagaggccaatgaaggagagaacaacagcttgttacaccctatgagccagcatgggatggaggacccggagggagaagtattagtgtggaagtttgacagcctcctagcatttcgtcacatggcccgagagctgcatccggagtactacaaagactgctgacatcgagctttctacaagggactttccgctggggactttccagggaggtgtggcctgggcgggactggggagtggcgagccctcagatgctacatataagcagctgctttttgcctgtactgggtctctctggttagaccagatctgagcctgggagctctctggctaactagggaacccactgcttaagcctcaataaagcttgccttgagtgctcaaagtagtgtgtgcccgtctgttgtgtgactctggtaactagagatccctcagacccttttagtcagtgtggaaaatctctagcagtggcgcccgaacagggacttgaaagcgaaagtaaagccagaggagatctctcgacgcaggactcggcttgctgaagcgcgcacggcaagaggcgaggggcggcgactggtgagtacgccaaaaattttgactagcggaggctagaaggagagagatgggtgcgagagcgtcggtattaagcgggggagaattagataaatgggaaaaaattcggttaaggccagggggaaagaaacaatataaactaaaacatatagtatgggcaagcagggagctagaacgattcgcagttaatcctggccttttagagacatcagaaggctgtagacaaatactgggacagctacaaccatcccttcagacaggatcagaagaacttagatcattatataatacaatagcagtcctctattgtgtgcatcaaaggatagatgtaaaagacaccaaggaagccttagataagatagaggaagagcaaaacaaaagtaagaaaaaggcacagcaagcagcagctgacacaggaaacaacagccaggtcagccaaaattaccctatagtgcagaacctccaggggcaaatggtacatcaggccatatcacctagaactttaaatgcatgggtaaaagtagtagaagagaaggctttcagcccagaagtaatacccatgttttcagcattatcagaaggagccaccccacaagatttaaataccatgctaaacacagtggggggacatcaagcagccatgcaaatgttaaaagagaccatcaatgaggaagctgcagaatgggatagattgcatccagtgcatgcaccgtccatgaagggttcgatcaggcagctcaagaaacacgtatggcaacggcagattcgttttccacagggatggaaaggatcaccagcaatattccagtgtagcatgacaaaaatcttagagccttttagaaaacaaaatccagacatagtcatctatcaatacatggatgatttgtatgtaggatctgacttagaaatagggcagcatagaacaaaaatagaggaactgagacaacatctgttgaggtggggatttaccacaccagacaaaaaacatcagaaagaacctccattcctttggatgggttatgaactccatcctgataaatggacagtacagcctatagtgctgccagaaaaggacagctggactgtcaatgacatacagaaattagtgggaaaattgaattgggcaagtcagatttatgcagggattaaagtaaggcaattatgtaaacttcttaggggaaccaaagcactaacagaagtagtaccactaacagaagaagcagagctagaactggcagaaaacagggagattctaaaagaaccggtacatggagtgtattatgacccatcaaaagacttaatagcagaaatacagaagcaggggcaaggccaatggacatatcaaatttatcaagagccatttaaaaatctgaaaacaggaaagtatgcaagaatgaagggtgcccacactaatgatgtgaaacaattaacagaggcagtacaaaaaatagccacagaaagcatagtaatatggggaaagactcctaaatttaaattacccatacaaaaggaaacatgggaagcatggtggacagagtattggcaagccacctggattcctgagtgggagtttgtcaatacccctcccttagtgaagttatggtaccagttagagaaagaacccataataggagcagaaactttctatgtagatggggcagccaatagggaaactaaattaggaaaagcaggatatgtaactgacagaggaagacaaaaagttgtccccctaacggacacaacaaatcagaagactgagttacaagcaattcatctagctttgcaggattcgggattagaagtaaacatagtgacagactcacaatatgcattgggaatcattcaagcacaaccagataagagtgaatcagagttagtcagtcaaataatagagcagttaataaaaaaggaaaaagtctacctggcatgggtaccagcacacaaaggaattggaggaaatgaacaagtagataaattggtcagtgctggaatcaggaaagtactatttttagatggaatagataaggcccaagaagaacatgagaaatatcacagtaattggagagcaatggctagtgattttaacctaccacctgtagtagcaaaagaaatagtagccagctgtgataaatgtcagctaaaaggggaagccatgcatggacaagtagactgtagcccaggaatatggcagctagattgtacacatttagaaggaaaagttatcttggtagcagttcatgtagccagtggatatatagaagcagaagtaattccagcagagacagggcaagaaacagcatacttcctcttaaaattagcaggaagatggccagtaaaaacagtacatacagacaatggcagcaatttcaccagtactacagttaaggccgcctgttggtgggcggggatcaagcaggaatttggcattccctacaatccccaaagtcaaggagtaatagaatctatgaataaagaattaaagaaaattataggacaggtaagagatcaggctgaacatcttaagacagcagtacaaatggcagtattcatccacaattttaaaagaaaaggggggattggggggtacagtgcaggggaaagaatagtagacataatagcaacagacatacaaactaaagaattacaaaaacaaattacaaaaattcaaaattttcgggtttattacagggacagcagagatccagtttggaaaggaccagcaaagctcctctggaaaggtgaaggggcagtagtaatacaagataatagtgacataaaagtagtgccaagaagaaaagcaaagatcatcagggattaaccgtccatgaagggttcgattatctgtagccaacattcgatatggcaacggcagattcgttggagatgggggtggaaatggggcaccatgctccttgggatattgatgatctgtagtgctacagaaaaattgtgggtcacagtctattatggggtacctgtgtggaaggaagcaaccaccactctattttgtgcatcagatgctaaagcatatgatacagaggtacataatgtttgggccacacatgcctgtgtacccacagaccccaacccacaagaagtagtattggtaaatgtgacagaaaattttaacatgtggaaaaatgacatggtagaacagatgcatgaggatataatcagtttatgggatcaaagcctaaagccatgtgtaaaattaaccccactctgtgttagtttaaagtgcactgatttgaagaatgatactaataccaatagtagtagcgggagaatgataatggagaaaggagagataaaaaactgctctttcaatatcagcacaagcataagagataaggtgcagaaagaatatgcattcttttataaacttgatatagtaccaatagataataccagctataggttgataagttgtaacacctcagtcattacacaggcctgtccaaaggtatcctttgagccaattcccatacattattgtgccccggctggttttgcgattctaaaatgtaataataagacgttcaatggaacaggaccatgtacaaatgtcagcacagtacaatgtacacatggaatcaggccagtagtatcaactcaactgctgttaaatggcagtctagcagaagaagatgtagtaattagatctgccaatttcacagacaatgctaaaaccataatagtacagctgaacacatctgtagaaattaattgtacaagacccaacaacaatacaagaaaaagtatccgtatccagaggggaccagggagagcatttgttacaataggaaaaataggaaatatgagacaagcacattgtaacattagtagagcaaaatggaatgccactttaaaacagatagctagcaaattaagagaacaatttggaaataataaaacaataatctttaagcaatcctcaggaggggacccagaaattgtaacgcacagttttaattgtggaggggaatttttctactgtaattcaacacaactgtttaatagtacttggtttaatagtacttggagtactgaagggtcaaataacactgaaggaagtgacacaatcacactcccatgcagaataaaacaatttataaacatgtggcaggaagtaggaaaagcaatgtatgcccctcccatcagtggacaaattagatgttcatcaaatattactgggctgctattaacaagagatggtggtaataacaacaatgggtccgagatcttcagacctggaggaggcgatatgagggacaattggagaagtgaattatataaatataaagtagtaaaaattgaaccattaggagtagcacccaccaaggcaaagagaagagtggtgcagagagaaaaaagagcagtgggaataggagctttgttccttgggttcttgggagcagcaggaagcactatgggcgcagcgtcaatgacgctgacggtacaggccagacaattattgtctgatatagtgcagcagcagaacaatttgctgagggctattgaggcgcaacagcatctgttgcaactcacagtctggggcatcaaacagctccaggcaagaatcctggctgtggaaagatacctaaaggatcaacagctcctggggatttggggttgctctggaaaactcatttgcaccactgctgtgccttggaatgctagttggagtaataaatctctggaacagatttggaataacatgacctggatggagtgggacagagaaattaacaattacacaagcttaatacactccttaattgaagaatcgcaaaaccagcaagaaaagaatgaacaagaattattggaattagataaatgggcaagtttgtggaattggtttaacataacaaattggctgtggtatataaaattattcataatgatagtaggaggcttggtaggtttaagaatagtttttgctgtactttctatagtgaatagagttaggcagggatattcaccattatcgtttcagacccacctcccaatcccgaggggacccgacaggcccgaaggaatagaagaagaaggtggagagagagacagagacagatccattcgattagtgaacggatccttagcacttatctgggacgatctgcggagcctgtgcctcttcagctaccaccgcttgagagacttactcttgattgtaacgaggattgtggaacttctgggacgcagggggtgggaagccctcaaatattggtggaatctcctacagtattggagtcaggaactaaagaatagtgctgttaacttgctcaatgccacagccatagcagtagctgaggggacagatagggttatagaagtattacaagcagcttatagagctattcgccacatacctagaagaataagacagggcttggaaaggattttgctataagatgggtggcaagtggtcaaaaagtagtgtgattggatggcctgctgtaagggaaagaatgagacgagctgagccagcagcagatggggtgggagcagtatctcgagacctagaaaaacatggagcaatcacaagtagcaatacagcagctaacaatgctgcttgtgcctggctagaagcacaagaggaggaagaggtgggttttccagtcacacctcaggtacctttaagaccaatgacttacaaggcagctgtagatcttagccactttttaaaagaaaaggggggactggaagggctaattcactcccaaagaagacaagatatccttgatctgtggatctaccacacacaaggctacttccctgattggcagaactacacaccagggccaggggtcagatatccactgacctttggatggtgctacaagctagtaccagttgagccagataaggtagaagaggccaataaaggagagaacaccagcttgttacaccctgtgagcctgcatggaatggatgaccctgagagagaagtgttagagtggaggtttgacagccgcctagcatttcatcacgtggcccgagagctgcatccggagtacttcaagaactgctgacatcgagcttgctacaagggactttccgctggggactttccagggaggcgtggcctgggcgggactggggagtggcgagccctcagatgctgcatataagcagctgctttttgcctgtactgggtctctctggttagaccagatctgagcctgggagctctctggctaactagggaacccactgcttaagcctcaataaagcttgccttgagtgcttcaagtagtgtgtgcccgtctgttgtgtgactctggtaactagagatccctcagacccttttagtcagtgtggaaaatctctagca

SEQ ID NO: 91 - DNA, 7301 bp, Artificial Sequence
  Synthetic Sequence
tggaagggctaatttggtcccaaaaaagacaagagatccttgatctgtggatctaccacacacaaggctacttccctgattggcagaactacacaccagggccagggatcagatatccactgacctttggatggtgcttcaagttagtaccagttgaaccagagcaagtagaagaggccaatgaaggagagaacaacagcttgttacaccctatgagccagcatgggatggaggacccggagggagaagtattagtgtggaagtttgacagcctcctagcatttcgtcacatggcccgagagctgcatccggagtactacaaagactgctgacatcgagctttctacaagggactttccgctggggactttccagggaggtgtggcctgggcgggactggggagtggcgagccctcagatgctacatataagcagctgctttttgcctgtactgggtctctctggttagaccagatctgagcctgggagctctctggctaactagggaacccactgcttaagcctcaataaagcttgccttgagtgctcaaagtagtgtgtgcccgtctgttgtgtgactctggtaactagagatccctcagacccttttagtcagtgtggaaaatctctagcagtggcgcccgaacagggacttgaaagcgaaagtaaagccagaggagatctctcgacgcaggactcggcttgctgaagcgcgcacggcaagaggcgaggggcggcgactggtgagtacgccaaaaattttgactagcggaggctagaaggagagagatgggtgcgagagcgtcggtattaagcgggggagaattagataaatgggaaaaaattcggttaaggccagggggaaagaaacaatataaactaaaacatatagtatgggcaagcagggagctagaacgattcgcagttaatcctggccttttagagacatcagaaggctgtagacaaatactgggacagctacaaccatcccttcagacaggatcagaagaacttagatcattatataatacaatagcagtcctctattgtgtgcatcaaaggatagatgtaaaagacaccaaggaagccttagataagatagaggaagagcaaaacaaaagtaagaaaaaggcacagcaagcagcagctgacacaggaaacaacagccaggtcagccaaaattaccctatagtgcagaacctccaggggcaaatggtacatcaggccatatcacctagaactttaaatgcatgggtaaaagtagtagaagagaaggctttcagcccagaagtaatacccatgttttcagcattatcagaaggagccaccccacaagatttaaataccatgctaaacacagtggggggacatcaagcagccatgcaaatgttaaaagagaccatcaatgaggaagctgcagaatgggatagattgcatccagtgcatgcaccgtccatgaagggttcgatcaggcagctcaagaaacacgtatggcaacggcagattcgttttccacagggatggaaaggatcaccagcaatattccagtgtagcatgacaaaaatcttagagccttttagaaaacaaaatccagacatagtcatctatcaatacatggatgatttgtatgtaggatctgacttagaaatagggcagcatagaacaaaaatagaggaactgagacaacatctgttgaggtggggatttaccacaccagacaaaaaacatcagaaagaacctccattcctttggatgggttatgaactccatcctgataaatggacagtacagcctatagtgctgccagaaaaggacagctggactgtcaatgacatacagaaattagtgggaaaattgaattgggcaagtcagatttatgcagggattaaagtaaggcaattatgtaaacttcttaggggaaccaaagcactaacagaagtagtaccactaacagaagaagcagagctagaactggcagaaaacagggagattctaaaagaaccggtacatggagtgtattatgacccatcaaaagacttaatagcagaaatacagaagcaggggcaaggccaatggacatatcaaatttatcaagagccatttaaaaatctgaaaacaggaaagtatgcaagaatgaacgaatctgccgttgccatatacagcatctgaacaagctgatcgaacccttcatggacggttaaggccgcctgttggtgggcggggatcaagcaggaatttggcattccctacaatccccaaagtcaaggagtaatagaatctatgaataaagaattaaagaaaattataggacaggtaagagatcaggctgaacatcttaagacagcagtacaaatggcagtattcatccacaattttaaaagaaaaggggggattggggggtacagtgcaggggaaagaatagtagacataatagcaacagacatacaaactaaagaattacaaaaacaaattacaaaaattcaaaattttcgggtttattacagggacagcagagatccagtttggaaaggaccagcaaagctcctctggaaaggtgaaggggcagtagtaatacaagataatagtgacataaaagtagtgccaagaagaaaagcaaagatcatcagggattatggaaaacagatggcaggtgatgattgtgtggcaagtagacaggatgaggattaacacatggaaaagattagtaaaacaccatatgtatatttcaaggaaagctaaggactggttttatagacatcactatgaaagtactaatccaaaaataagttcagaagtacacatcccactaggggatgctaaattagtaataacaacatattggggtctgcatacaggagaaagagactggcatttgggtcagggagtctccatagaatggaggaaaaagagatatagcacacaagtagaccctgacctagcagaccaactaattcatctgcactattttgattgtttttcagaatctgctataagaaataccatattaggacgtatagttagtcctaggtgtgaatatcaagcaggacataacaaggtaggatctctacagtacttggcactagcagcattaataaaaccaaaacagataaagccacctttgcctagtgttaggaaactgacagaggacagatggaacaagccccagaagaccaagggccacagagggagccatacaatgaatggacactagagcttttagaggaacttaagagtgaagctgttagacattttcctaggatatggctccataacttaggacaacatatctatgaaacttacggggatacttgggcaggagtggaagccataataagaattctgcaacaactgctgtttatccatttcagaattgggtgtcgacatagcagaataggcgttactcgacagaggagagcaagaaatggagccagtagatcctagactagagccctggaagcatccaggaagtcagcctaaaactgcttgtaccaattgctattgtaaaaagtgttgctttcattgccaagtttgtttcatgacaaaagccttaggcatctcctatggcaggaagaagcggagacagcgacgaagagctcatcagaacagtcagactcatcaagcttctctatcaaagcagtaagtagtacatgtaatgcaacctataatagtagcaatagtagcattagtagtagcaataataatagcaatagttgtgtggtccatagtaatcatagaatataggaaaatattaagacaaagaaaaatagacaggttaattgatagactaatagaaagagcagaagacagtggcaatgagagtgaaggagaagtatcagcacttgtggagatgggggtggaaatggggcaccatgctccttgggatattgatgatctgtagtgctacagaaaaattgtgggtcacagtctattatggggtacctgtgtggaaggaagcaaccaccactctattttgtgcatcagatgctaaagcatatgatacagaggtacataatgtttgggccacacatgcctgtgtacccacagaccccaacccacaagaagtagtattggtaaatgtgacagaaaattttaacatgtggaaaaatgacatggtagaacagatgcatgaggatataatcagtttatgggatcaaagcctaaagccatgtgtaaaattaaccccactctgtgttagtttaaagtgcactgatttgaagaatgatactaataccaatagtagtagcgggagaatgataatggagaaaggagagataaaaaactgctctttcaatatcagcacaagcataagagataaggtgcagaaagaatatgcattcttttataaacttgatatagtaccaatagataataccagctataggttgataagttgtaacacctcagtcattacacaggcctgtccaaaggtatcctttgagccaattcccatacattattgtgccccggctggttttgcgattctaaaatgtaataataagacgttcaatggaacaggaccatgtacaaatgtcagcacagtacaatgtacacatggaatcaggccagtagtatcaactcaactgctgttaaatggcagtctagcagaagaagatgtagtaattagatctgccaatttcacagacaatgctaaaaccataatagtacagctgaacacatctgtagaaattaattgtacaagacccaacaacaatacaagaaaaagtatccgtatccagaggggaccagggagagcatttgttacaataggaaaaataggaaatatgagacaagcacattgtaacattagtagagcaaaatggaatgccactttaaaacagatagctagcaaattaagagaacaatttggaaataataaaacaataatctttaagcaatcctcaggaggggacccagaaattgtaacgcacagttttaattgtggaggggaatttttctactgtaattcaacacaactgtttaatagtacttggtttaatagtacttggagtactgaagggtcaaataacactgaaggaagtgacacaatcacactcccatgcagaataaaacaatttataaacatgtggcaggaagtaggaaaagcaatgtatgcccctcccatcagtggacaaattagatgttcatcaaatattactgggctgctattaacaagagatggtggtaataacaacaatgggtccgagatcttcagacctggaggaggcgatatgagggacaattggagaagtgaattatataaatataaagtagtaaaaattgaaccattaggagtagcacccaccaaggcaaagagaagagtggtgcagagagaaaaaagagcagtgggaataggagctttgttccttgggttcttgggagcagcaggaagcactatgggcgcagcgtcaatgacgctgacggtacaggccagacaattattgtctgatatagtgcagcagcagaacaatttgctgagggctattgaggcgcaacagcatctgttgcaactcacagtctggggcatcaaacagctccaggcaagaatcctggctgtggaaagatacctaaaggatcaacagctcctggggatttggggttgctctggaaaactcatttgcaccactgctgtgccttggaatgctagttggagtaataaatctctggaacagatttggaataacatgacctggatggagtgggacagagaaattaacaattacacaagcttaatacactccttaattgaagaatcgcaaaaccagcaagaaaagaatgaacaagaattattggaattagataaatgggcaagtttgtggaattggtttaacataacaaattggctgtggtatataaaattattcataatgatagtaggaggcttggtaggtttaagaatagtttttgctgtactttctatagtgaatagagttaggcagggatattcaccattatcgtttcagacccacctcccaatcccgaggggacccgacaggcccgaaggaatagaagaagaaggtggagagagagacagagacagatccattcgattagtgaacggatccttagcacttatctgggacgatctgcggagcctgtgcctcttcagctaccaccgcttgagagacttactcttgattgtaacgaggattgtggaacttctgggacgcagggggtgggaagccctcaaatattggtggaatctcctacagtattggagtcaggaactaaagaatagtgctgttaacttgctcaatgccacagccatagcagtagctgaggggacagatagggttatagaagtattacaagcagcttatagagctattcgccacatacctagaagaataagacagggcttggaaaggattttgctataagatgggtggcaagtggtcaaaaagtagtgtgattggatggcctgctgtaagggaaagaatgagacgagctgagccagcagcagatggggtgggagcagtatctcgagacctagaaaaacatggagcaatcacaagtagcaatacagcagctaacaatgctgcttgtgcctggctagaagcacaagaggaggaagaggtgggttttccagtcacacctcaggtacctttaagaccaatgacttacaaggcagctgtagatcttagccactttttaaaagaaaaggggggactggaagggctaattcactcccaaagaagacaagatatccttgatctgtggatctaccacacacaaggctacttccctgattggcagaactacacaccagggccaggggtcagatatccactgacctttggatggtgctacaagctagtaccagttgagccagataaggtagaagaggccaataaaggagagaacaccagcttgttacaccctgtgagcctgcatggaatggatgaccctgagagagaagtgttagagtggaggtttgacagccgcctagcatttcatcacgtggcccgagagctgcatccggagtacttcaagaactgctgacatcgagcttgctacaagggactttccgctggggactttccagggaggcgtggcctgggcgggactggggagtggcgagccctcagatgctgcatataagcagctgctttttgcctgtactgggtctctctggttagaccagatctgagcctgggagctctctggctaactagggaacccactgcttaagcctcaataaagcttgccttgagtgcttcaagtagtgtgtgcccgtctgttgtgtgactctggtaactagagatccctcagacccttttagtcagtgtggaaaatctctagca

SEQ ID NO: 92 - DNA, 6378 bp, Artificial Sequence
  Synthetic Sequence
tggaagggctaatttggtcccaaaaaagacaagagatccttgatctgtggatctaccacacacaaggctacttccctgattggcagaactacacaccagggccagggatcagatatccactgacctttggatggtgcttcaagttagtaccagttgaaccagagcaagtagaagaggccaatgaaggagagaacaacagcttgttacaccctatgagccagcatgggatggaggacccggagggagaagtattagtgtggaagtttgacagcctcctagcatttcgtcacatggcccgagagctgcatccggagtactacaaagactgctgacatcgagctttctacaagggactttccgctggggactttccagggaggtgtggcctgggcgggactggggagtggcgagccctcagatgctacatataagcagctgctttttgcctgtactgggtctctctggttagaccagatctgagcctgggagctctctggctaactagggaacccactgcttaagcctcaataaagcttgccttgagtgctcaaagtagtgtgtgcccgtctgttgtgtgactctggtaactagagatccctcagacccttttagtcagtgtggaaaatctctagcagtggcgcccgaacagggacttgaaagcgaaagtaaagccagaggagatctctcgacgcaggactcggcttgctgaagcgcgcacggcaagaggcgaggggcggcgactggtgagtacgccaaaaattttgactagcggaggctagaaggagagagatgggtgcgagagcgtcggtattaagcgggggagaattagataaatgggaaaaaattcggttaaggccagggggaaagaaacaatataaactaaaacatatagtatgggcaagcagggagctagaacgattcgcagttaatcctggccttttagagacatcagaaggctgtagacaaatactgggacagctacaaccatcccttcagacaggatcagaagaacttagatcattatataatacaatagcagtcctctattgtgtgcatcaaaggatagatgtaaaagacaccaaggaagccttagataagatagaggaagagcaaaacaaaagtaagaaaaaggcacagcaagcagcagctgacacaggaaacaacagccaggtcagccaaaattaccctatagtgcagaacctccaggggcaaatggtacatcaggccatatcacctagaactttaaatgcatgggtaaaagtagtagaagagaaggctttcagcccagaagtaatacccatgttttcagcattatcagaaggagccaccccacaagatttaaataccatgctaaacacagtggggggacatcaagcagccatgcaaatgttaaaagagaccatcaatgaggaagctgcagaatgggatagattgcatccagtgcatgcaccgtccatgaagggttcgatcaggcagctcaagaaacacgtatggcaacggcagattcgttttccacagggatggaaaggatcaccagcaatattccagtgtagcatgacaaaaatcttagagccttttagaaaacaaaatccagacatagtcatctatcaatacatggatgatttgtatgtaggatctgacttagaaatagggcagcatagaacaaaaatagaggaactgagacaacatctgttgaggtggggatttaccacaccagacaaaaaacatcagaaagaacctccattcctttggatgggttatgaactccatcctgataaatggacagtacagcctatagtgctgccagaaaaggacagctggactgtcaatgacatacagaaattagtgggaaaattgaattgggcaagtcagatttatgcagggattaaagtaaggcaattatgtaaacttcttaggggaaccaaagcactaacagaagtagtaccactaacagaagaagcagagctagaactggcagaaaacagggagattctaaaagaaccggtacatggagtgtattatgacccatcaaaagacttaatagcagaaatacagaagcaggggcaaggccaatggacatatcaaatttatcaagagccatttaaaaatctgaaaacaggaaagtatgcaagaatgaacgaatctgccgttgccatatacagcatctgaacaagctgatcgaacccttcatggacggttaaggccgcctgttggtgggcggggatcaagcaggaatttggcattccctacaatccccaaagtcaaggagtaatagaatctatgaataaagaattaaagaaaattataggacaggtaagagatcaggctgaacatcttaagacagcagtacaaatggcagtattcatccacaattttaaaagaaaaggggggattggggggtacagtgcaggggaaagaatagtagacataatagcaacagacatacaaactaaagaattacaaaaacaaattacaaaaattcaaaattttcgggtttattacagggacagcagagatccagtttggaaaggaccagcaaagctcctctggaaaggtgaaggggcagtagtaatacaagataatagtgacataaaagtagtgccaagaagaaaagcaaagatcatcagggattatggaaaacagatggcaggtgatgattgtgtggcccgtccatgaagggttcgattcttgaacagcgcggtctgttatggcaacggcagattcgtttaatgcaacctataatagtagcaatagtagcattagtagtagcaataataatagcaatagttgtgtggtccatagtaatcatagaatataggaaaatattaagacaaagaaaaatagacaggttaattgatagactaatagaaagagcagaagacagtggcaatgagagtgaaggagaagtatcagcacttgtggagatgggggtggaaatggggcaccatgctccttgggatattgatgatctgtagtgctacagaaaaattgtgggtcacagtctattatggggtacctgtgtggaaggaagcaaccaccactctattttgtgcatcagatgctaaagcatatgatacagaggtacataatgtttgggccacacatgcctgtgtacccacagaccccaacccacaagaagtagtattggtaaatgtgacagaaaattttaacatgtggaaaaatgacatggtagaacagatgcatgaggatataatcagtttatgggatcaaagcctaaagccatgtgtaaaattaaccccactctgtgttagtttaaagtgcactgatttgaagaatgatactaataccaatagtagtagcgggagaatgataatggagaaaggagagataaaaaactgctctttcaatatcagcacaagcataagagataaggtgcagaaagaatatgcattcttttataaacttgatatagtaccaatagataataccagctataggttgataagttgtaacacctcagtcattacacaggcctgtccaaaggtatcctttgagccaattcccatacattattgtgccccggctggttttgcgattctaaaatgtaataataagacgttcaatggaacaggaccatgtacaaatgtcagcacagtacaatgtacacatggaatcaggccagtagtatcaactcaactgctgttaaatggcagtctagcagaagaagatgtagtaattagatctgccaatttcacagacaatgctaaaaccataatagtacagctgaacacatctgtagaaattaattgtacaagacccaacaacaatacaagaaaaagtatccgtatccagaggggaccagggagagcatttgttacaataggaaaaataggaaatatgagacaagcacattgtaacattagtagagcaaaatggaatgccactttaaaacagatagctagcaaattaagagaacaatttggaaataataaaacaataatctttaagcaatcctcaggaggggacccagaaattgtaacgcacagttttaattgtggaggggaatttttctactgtaattcaacacaactgtttaatagtacttggtttaatagtacttggagtactgaagggtcaaataacactgaaggaagtgacacaatcacactcccatgcagaataaaacaatttataaacatgtggcaggaagtaggaaaagcaatgtatgcccctcccatcagtggacaaattagatgttcatcaaatattactgggctgctattaacaagagatggtggtaataacaacaatgggtccgagatcttcagacctggaggaggcgatatgagggacaattggagaagtgaattatataaatataaagtagtaaaaattgaaccattaggagtagcacccaccaaggcaaagagaagagtggtgcagagagaaaaaagagcagtgggaataggagctttgttccttgggttcttgggagcagcaggaagcactatgggcgcagcgtcaatgacgctgacggtacaggccagacaattattgtctgatatagtgcagcagcagaacaatttgctgagggctattgaggcgcaacagcatctgttgcaactcacagtctggggcatcaaacagctccaggcaagaatcctggctgtggaaagatacctaaaggatcaacagctcctggggatttggggttgctctggaaaactcatttgcaccactgctgtgccttggaatgctagttggagtaataaatctctggaacagatttggaataacatgacctggatggagtgggacagagaaattaacaattacacaagcttaatacactccttaattgaagaatcgcaaaaccagcaagaaaagaatgaacaagaattattggaattagataaatgggcaagtttgtggaattggtttaacataacaaattggctgtggtatataaaattattcataatgatagtaggaggcttggtaggtttaagaatagtttttgctgtactttctatagtgaatagagttaggcagggatattcaccattatcgtttcagacccacctcccaatcccgaggggacccgacaggcccgaaggaatagaagaagaaggtggagagagagacagagacagatccattcgattagtgaacggatccttagcacttatctgggacgatctgcggagcctgtgcctcttcagctaccaccgcttgagagacttactcttgattgtaacgaggattgtggaacttctgggacgcagggggtgggaagccctcaaatattggtggaatctcctacagtattggagtcaggaactaaagaatagtgctgttaacttgctcaatgccacagccatagcagtagctgaggggacagatagggttatagaagtattacaagcagcttatagagctattcgccacatacctagaagaataagacagggcttggaaaggattttgctataagatgggtggcaagtggtcaaaaagtagtgtgattggatggcctgctgtaagggaaagaatgagacgagctgagccagcagcagatggggtgggagcagtatctcgagacctagaaaaacatggagcaatcacaagtagcaatacagcagctaacaatgctgcttgtgcctggctagaagcacaagaggaggaagaggtgggttttccagtcacacctcaggtacctttaagaccaatgacttacaaggcagctgtagatcttagccactttttaaaagaaaaggggggactggaagggctaattcactcccaaagaagacaagatatccttgatctgtggatctaccacacacaaggctacttccctgattggcagaactacacaccagggccaggggtcagatatccactgacctttggatggtgctacaagctagtaccagttgagccagataaggtagaagaggccaataaaggagagaacaccagcttgttacaccctgtgagcctgcatggaatggatgaccctgagagagaagtgttagagtggaggtttgacagccgcctagcatttcatcacgtggcccgagagctgcatccggagtacttcaagaactgctgacatcgagcttgctacaagggactttccgctggggactttccagggaggcgtggcctgggcgggactggggagtggcgagccctcagatgctgcatataagcagctgctttttgcctgtactgggtctctctggttagaccagatctgagcctgggagctctctggctaactagggaacccactgcttaagcctcaataaagcttgccttgagtgcttcaagtagtgtgtgcccgtctgttgtgtgactctggtaactagagatccctcagacccttttagtcagtgtggaaaatctctagca

SEQ ID NO: 93 - DNA, 6153 bp, Artificial Sequence
  Synthetic Sequence
tggaagggctaatttggtcccaaaaaagacaagagatccttgatctgtggatctaccacacacaaggctacttccctgattggcagaactacacaccagggccagggatcagatatccactgacctttggatggtgcttcaagttagtaccagttgaaccagagcaagtagaagaggccaatgaaggagagaacaacagcttgttacaccctatgagccagcatgggatggaggacccggagggagaagtattagtgtggaagtttgacagcctcctagcatttcgtcacatggcccgagagctgcatccggagtactacaaagactgctgacatcgagctttctacaagggactttccgctggggactttccagggaggtgtggcctgggcgggactggggagtggcgagccctcagatgctacatataagcagctgctttttgcctgtactgggtctctctggttagaccagatctgagcctgggagctctctggctaactagggaacccactgcttaagcctcaataaagcttgccttgagtgctcaaagtagtgtgtgcccgtctgttgtgtgactctggtaactagagatccctcagacccttttagtcagtgtggaaaatctctagcagtggcgcccgaacagggacttgaaagcgaaagtaaagccagaggagatctctcgacgcaggactcggcttgctgaagcgcgcacggcaagaggcgaggggcggcgactggtgagtacgccaaaaattttgactagcggaggctagaaggagagagatgggtgcgagagcgtcggtattaagcgggggagaattagataaatgggaaaaaattcggttaaggccagggggaaagaaacaatataaactaaaacatatagtatgggcaagcagggagctagaacgattcgcagttaatcctggccttttagagacatcagaaggctgtagacaaatactgggacagctacaaccatcccttcagacaggatcagaagaacttagatcattatataatacaatagcagtcctctattgtgtgcatcaaaggatagatgtaaaagacaccaaggaagccttagataagatagaggaagagcaaaacaaaagtaagaaaaaggcacagcaagcagcagctgacacaggaaacaacagccaggtcagccaaaattaccctatagtgcagaacctccaggggcaaatggtacatcaggccatatcacctagaactttaaatgcatgggtaaaagtagtagaagagaaggctttcagcccagaagtaatacccatgttttcagcattatcagaaggagccaccccacaagatttaaataccatgctaaacacagtggggggacatcaagcagccatgcaaatgttaaaagagaccatcaatgaggaagctgcagaatgggatagattgcatccagtgcatgcaccgtccatgaagggttcgatcaggcagctcaagaaacacgtatggcaacggcagattcgttttccacagggatggaaaggatcaccagcaatattccagtgtagcatgacaaaaatcttagagccttttagaaaacaaaatccagacatagtcatctatcaatacatggatgatttgtatgtaggatctgacttagaaatagggcagcatagaacaaaaatagaggaactgagacaacatctgttgaggtggggatttaccacaccagacaaaaaacatcagaaagaacctccattcctttggatgggttatgaactccatcctgataaatggacagtacagcctatagtgctgccagaaaaggacagctggactgtcaatgacatacagaaattagtgggaaaattgaattgggcaagtcagatttatgcagggattaaagtaaggcaattatgtaaacttcttaggggaaccaaagcactaacagaagtagtaccactaacagaagaagcagagctagaactggcagaaaacagggagattctaaaagaaccggtacatggagtgtattatgacccatcaaaagacttaatagcagaaatacagaagcaggggcaaggccaatggacatatcaaatttatcaagagccatttaaaaatctgaaaacaggaaagtatgcaagaatgaacgaatctgccgttgccatatacagcatctgaacaagctgatcgaacccttcatggacggttaaggccgcctgttggtgggcggggatcaagcaggaatttggcattccctacaatccccaaagtcaaggagtaatagaatctatgaataaagaattaaagaaaattataggacaggtaagagatcaggctgaacatcttaagacagcagtacaaatggcagtattcatccacaattttaaaagaaaaggggggattggggggtacagtgcaggggaaagaatagtagacataatagcaacagacatacaaactaaagaattacaaaaacaaattacaaaaattcaaaattttcgggtttattacagggacagcagagatccagtttggaaaggaccagcaaagctcctctggaaaggtgaaggggcagtagtaatacaagataatagtgacataaaagtagtgccaagaagaaaagcaaagatcatcagggattaaccgtccatgaagggttcgattatctgtagccaacattcgatatggcaacggcagattcgttggagatgggggtggaaatggggcaccatgctccttgggatattgatgatctgtagtgctacagaaaaattgtgggtcacagtctattatggggtacctgtgtggaaggaagcaaccaccactctattttgtgcatcagatgctaaagcatatgatacagaggtacataatgtttgggccacacatgcctgtgtacccacagaccccaacccacaagaagtagtattggtaaatgtgacagaaaattttaacatgtggaaaaatgacatggtagaacagatgcatgaggatataatcagtttatgggatcaaagcctaaagccatgtgtaaaattaaccccactctgtgttagtttaaagtgcactgatttgaagaatgatactaataccaatagtagtagcgggagaatgataatggagaaaggagagataaaaaactgctctttcaatatcagcacaagcataagagataaggtgcagaaagaatatgcattcttttataaacttgatatagtaccaatagataataccagctataggttgataagttgtaacacctcagtcattacacaggcctgtccaaaggtatcctttgagccaattcccatacattattgtgccccggctggttttgcgattctaaaatgtaataataagacgttcaatggaacaggaccatgtacaaatgtcagcacagtacaatgtacacatggaatcaggccagtagtatcaactcaactgctgttaaatggcagtctagcagaagaagatgtagtaattagatctgccaatttcacagacaatgctaaaaccataatagtacagctgaacacatctgtagaaattaattgtacaagacccaacaacaatacaagaaaaagtatccgtatccagaggggaccagggagagcatttgttacaataggaaaaataggaaatatgagacaagcacattgtaacattagtagagcaaaatggaatgccactttaaaacagatagctagcaaattaagagaacaatttggaaataataaaacaataatctttaagcaatcctcaggaggggacccagaaattgtaacgcacagttttaattgtggaggggaatttttctactgtaattcaacacaactgtttaatagtacttggtttaatagtacttggagtactgaagggtcaaataacactgaaggaagtgacacaatcacactcccatgcagaataaaacaatttataaacatgtggcaggaagtaggaaaagcaatgtatgcccctcccatcagtggacaaattagatgttcatcaaatattactgggctgctattaacaagagatggtggtaataacaacaatgggtccgagatcttcagacctggaggaggcgatatgagggacaattggagaagtgaattatataaatataaagtagtaaaaattgaaccattaggagtagcacccaccaaggcaaagagaagagtggtgcagagagaaaaaagagcagtgggaataggagctttgttccttgggttcttgggagcagcaggaagcactatgggcgcagcgtcaatgacgctgacggtacaggccagacaattattgtctgatatagtgcagcagcagaacaatttgctgagggctattgaggcgcaacagcatctgttgcaactcacagtctggggcatcaaacagctccaggcaagaatcctggctgtggaaagatacctaaaggatcaacagctcctggggatttggggttgctctggaaaactcatttgcaccactgctgtgccttggaatgctagttggagtaataaatctctggaacagatttggaataacatgacctggatggagtgggacagagaaattaacaattacacaagcttaatacactccttaattgaagaatcgcaaaaccagcaagaaaagaatgaacaagaattattggaattagataaatgggcaagtttgtggaattggtttaacataacaaattggctgtggtatataaaattattcataatgatagtaggaggcttggtaggtttaagaatagtttttgctgtactttctatagtgaatagagttaggcagggatattcaccattatcgtttcagacccacctcccaatcccgaggggacccgacaggcccgaaggaatagaagaagaaggtggagagagagacagagacagatccattcgattagtgaacggatccttagcacttatctgggacgatctgcggagcctgtgcctcttcagctaccaccgcttgagagacttactcttgattgtaacgaggattgtggaacttctgggacgcagggggtgggaagccctcaaatattggtggaatctcctacagtattggagtcaggaactaaagaatagtgctgttaacttgctcaatgccacagccatagcagtagctgaggggacagatagggttatagaagtattacaagcagcttatagagctattcgccacatacctagaagaataagacagggcttggaaaggattttgctataagatgggtggcaagtggtcaaaaagtagtgtgattggatggcctgctgtaagggaaagaatgagacgagctgagccagcagcagatggggtgggagcagtatctcgagacctagaaaaacatggagcaatcacaagtagcaatacagcagctaacaatgctgcttgtgcctggctagaagcacaagaggaggaagaggtgggttttccagtcacacctcaggtacctttaagaccaatgacttacaaggcagctgtagatcttagccactttttaaaagaaaaggggggactggaagggctaattcactcccaaagaagacaagatatccttgatctgtggatctaccacacacaaggctacttccctgattggcagaactacacaccagggccaggggtcagatatccactgacctttggatggtgctacaagctagtaccagttgagccagataaggtagaagaggccaataaaggagagaacaccagcttgttacaccctgtgagcctgcatggaatggatgaccctgagagagaagtgttagagtggaggtttgacagccgcctagcatttcatcacgtggcccgagagctgcatccggagtacttcaagaactgctgacatcgagcttgctacaagggactttccgctggggactttccagggaggcgtggcctgggcgggactggggagtggcgagccctcagatgctgcatataagcagctgctttttgcctgtactgggtctctctggttagaccagatctgagcctgggagctctctggctaactagggaacccactgcttaagcctcaataaagcttgccttgagtgcttcaagtagtgtgtgcccgtctgttgtgtgactctggtaactagagatccctcagacccttttagtcagtgtggaaaatctctagca

SEQ ID NO: 94 - DNA, 8864 bp, Artificial Sequence
  Synthetic Sequence
tggaagggctaatttggtcccaaaaaagacaagagatccttgatctgtggatctaccacacacaaggctacttccctgattggcagaactacacaccagggccagggatcagatatccactgacctttggatggtgcttcaagttagtaccagttgaaccagagcaagtagaagaggccaatgaaggagagaacaacagcttgttacaccctatgagccagcatgggatggaggacccggagggagaagtattagtgtggaagtttgacagcctcctagcatttcgtcacatggcccgagagctgcatccggagtactacaaagactgctgacatcgagctttctacaagggactttccgctggggactttccagggaggtgtggcctgggcgggactggggagtggcgagccctcagatgctacatataagcagctgctttttgcctgtactgggtctctctggttagaccagatctgagcctgggagctctctggctaactagggaacccactgcttaagcctcaataaagcttgccttgagtgctcaaagtagtgtgtgcccgtctgttgtgtgactctggtaactagagatccctcagacccttttagtcagtgtggaaaatctctagcagtggcgcccgaacagggacttgaaagcgaaagtaaagccagaggagatctctcgacgcaggactcggcttgctgaagcgcgcacggcaagaggcgaggggcggcgactggtgagtacgccaaaaattttgactagcggaggctagaaggagagagatgggtgcgagagcgtcggtattaagcgggggagaattagataaatgggaaaaaattcggttaaggccagggggaaagaaacaatataaactaaaacatatagtatgggcaagcagggagctagaacgattcgcagttaatcctggccttttagagacatcagaaggctgtagacaaatactgggacagctacaaccatcccttcagacaggatcagaagaacttagatcattatataatacaatagcagtcctctattgtgtgcatcaaaggatagatgtaaaagacaccaaggaagccttagataagatagaggaagagcaaaacaaaagtaagaaaaaggcacagcaagcagcagctgacacaggaaacaacagccaggtcagccaaaattaccctatagtgcagaacctccaggggcaaatggtacatcaggccatatcacctagaactttaaatgcatgggtaaaagtagtagaagagaaggctttcagcccagaagtaatacccatgttttcagcattatcagaaggagccaccccacaagatttaaataccatgctaaacacagtggggggacatcaagcagccatgcaaatgttaaaagagaccatcaatgaggaagctgcagaatgggatagattgcatccagtgcatgcagggcctattgcaccaggccaaacgaatctgccgttgccatatgcagacattacactgtcgaatcgaacccttcatggacggtggaaaccaaaaatgatagggggaattggaggttttatcaaagtaagacagtatgatcagatactcatagaaatctgcggacataaagctataggtacagtattagtaggacctacacctgtcaacataattggaagaaatctgttgactcagattggctgcactttaaattttcccattagtcctattgagactgtaccagtaaaattaaagccaggaatggatggcccaaaagttaaacaatggccattgacagaagaaaaaataaaagcattagtagaaatttgtacagaaatggaaaaggaaggaaaaatttcaaaaattgggcctgaaaatccatacaatactccagtatttgccataaagaaaaaagacagtactaaatggagaaaattagtagatttcagagaacttaataagagaactcaagatttctgggaagttcaattaggaataccacatcctgcagggttaaaacagaaaaaatcagtaacagtactggatgtgggcgatgcatatttttcagttcccttagataaagacttcaggaagtatactgcatttaccatacctagtataaacaatgagacaccagggattagatatcagtacaatgtgcttccacagggatggaaaggatcaccagcaatattccagtgtagcatgacaaaaatcttagagccttttagaaaacaaaatccagacatagtcatctatcaatacatggatgatttgtatgtaggatctgacttagaaatagggcagcatagaacaaaaatagaggaactgagacaacatctgttgaggtggggatttaccacaccagacaaaaaacatcagaaagaacctccattcctttggatgggttatgaactccatcctgataaatggacagtacagcctatagtgctgccagaaaaggacagctggactgtcaatgacatacagaaattagtgggaaaattgaattgggcaagtcagatttatgcagggattaaagtaaggcaattatgtaaacttcttaggggaaccaaagcactaacagaagtagtaccactaacagaagaagcagagctagaactggcagaaaacagggagattctaaaagaaccggtacatggagtgtattatgacccatcaaaagacttaatagcagaaatacagaagcaggggcaaggccaatggacatatcaaatttatcaagagccatttaaaaatctgaaaacaggaaagtatgcaagaatgaagggtgcccacactaatgatgtgaaacaattaacagaggcagtacaaaaaatagccacagaaagcatagtaatatggggaaagactcctaaatttaaattacccatacaaaaggaaacatgggaagcatggtggacagagtattggcaagccacctggattcctgagtgggagtttgtcaatacccctcccttagtgaagttatggtaccagttagagaaagaacccataataggagcagaaactttctatgtagatggggcagccaatagggaaactaaattaggaaaagcaggatatgtaactgacagaggaagacaaaaagttgtccccctaacggacacaacaaatcagaagactgagttacaagcaattcatctagctttgcaggattcgggattagaagtaaacatagtgacagactcacaatatgcattgggaatcattcaagcacaaccagataagagtgaatcagagttagtcagtcaaataatagagcagttaataaaaaaggaaaaagtctacctggcatgggtaccagcacacaaaggaattggaggaaatgaacaagtagataaattggtcagtgctggaatcaggaaagtactatttttagatggaatagataaggcccaagaagaacatgagaaatatcacagtaattggagagcaatggctagtgattttaacctaccacctgtagtagcaaaagaaatagtagccagctgtgataaatgtcagctaaaaggggaagccatgcatggacaagtagactgtagcccaggaatatggcagctagattgtacacatttagaaggaaaagttatcttggtagcagttcatgtagccagtggatatatagaagcagaagtaattccagcagagacagggcaagaaacagcatacttcctcttaaaattagcaggaagatggccagtaaaaacagtacatacagacaatggcagcaatttcaccagtactacagttaaggccgcctgttggtgggcggggatcaagcaggaatttggcattccctacaatccccaaagtcaaggagtaatagaatctatgaataaagaattaaagaaaattataggacaggtaagagatcaggctgaacatcttaagacagcagtacaaatggcagtattcatccacaattttaaaagaaaaggggggattggggggtacagtgcaggggaaagaatagtagacataatagcaacagacatacaaactaaagaattacaaaaacaaattacaaaaattcaaaattttcgggtttattacagggacagcagagatccagtttggaaaggaccagcaaagctcctctggaaaggtgaaggggcagtagtaatacaagataatagtgacataaaagtagtgccaagaagaaaagcaaagatcatcagggattatggaaaacagatggcaggtgatgattgtgtggcaagtagacaggatgaggattaacacatggaaaagattagtaaaacaccatatgtatatttcaaggaaagctaaggactggttttatagacatcactatgaaagtactaatccaaaaataagttcagaagtacacatcccactaggggatgctaaattagtaataacaacatattggggtctgcatacaggagaaagagactggcatttgggtcagggagtctccatagaatggaggaaaaagagatatagcacacaagtagaccctgacctagcagaccaactaattcatctgcactattttgattgtttttcagaatctgctataagaaataccatattaggacgtatagttagtcctaggtgtgaatatcaagcaggacataacaaggtaggatctctacagtacttggcactagcagcattaataaaaccaaaacagataaagccacctttgcctagtgttaggaaactgacagaggacagatggaacaagccccagaagaccaagggccacagagggagccatacaatgaatggacactagagcttttagaggaacttaagagtgaagctgttagacattttcctaggatatggctccataacttaggacaacatatctatgaaacttacggggatacttgggcaggagtggaagccataataagaattctgcaacaactgctgtttatccatttcagaattgggtgtcgacatagcagaataggcgttactcgacagaggagagcaagaaatggagccagtagatcctagactagagccctggaagcatccaggaagtcagcctaaaactgcttgtaccaattgctattgtaaaaagtgttgctttcattgccaagtttgtttcatgacaaaagccttaggcatctcctatggcaggaagaagcggagacagcgacgaagagctcatcagaacagtcagactcatcaagcttctctatcaaagcagtaagtagtacatgtaatgcaacctataatagtagcaatagtagcattagtagtagcaataataatagcaatagttgtgtggtccatagtaatcatagaatataggaaaatattaagacaaagaaaaatagacaggttaattgatagactaatagaaagagcagaagacagtggcaatgagagtgaaggagaagtatcagcacttgtggagatgggggtggaaatggggcaccatgctccttgggatattgatgatctgtagtgctacagaaaaattgtgggtcacagtctattatggggtacctgtgtggaaggaagcaaccaccactctattttgtgcatcagatgctaaagcatatgatacagaggtacataatgtttgggccacacatgcctgtgtacccacagaccccaacccacaagaagtagtattggtaaatgtgacagaaaattttaacatgtggaaaaatgacatggtagaacagatgcatgaggatataatcagtttatgggatcaaagcctaaagccatgtgtaaaattaaccccactctgtgttagtttaaagtgcactgatttgaagaatgatactaataccaatagtagtagcgggagaatgataatggagaaaggagagataaaaaactgctctttcaatatcagcacaagcataagagataaggtgcagaaagaatatgcattcttttataaacttgatatagtaccaatagataataccagctataggttgataagttgtaacacctcagtcattacacaggcctgtccaaaggtatcctttgagccaattcccatacattattgtgccccggctggttttgcgattctaaaatgtaataataagacgttcaatggaacaggaccatgtacaaatgtcagcacagtacaatgtacacatggaatcaggccagtagtatcaactcaactgctgttaaatggcagtctagcagaagaagatgtagtaattagatctgccaatttcacagacaatgctaaaaccataatagtacagctgaacacatctgtagaaattaattgtacaagacccaacaacaatacaagaaaaagtatccgtatccagaggggaccagggagagcatttgttacaataggaaaaataggaaatatgagacaagcacattgtaacattagtagagcaaaatggaatgccactttaaaacagatagctagcaaattaagagaacaatttggaaataataaaacaataatctttaagcaatcctcaggaggggacccagaaattgtaacgcacagttttaattgtggaggggaatttttctactgtaattcaacacaactgtttaatagtacttggtttaatagtacttggagtactgaagggtcaaataacactgaaggaagtgacacaatcacactcccatgcagaataaaacaatttataaacatgtggcaggaagtaggaaaagcaatgtatgcccctcccatcagtggacaaattagatgttcatcaaatattactgggctgctattaacaagagatggtggtaataacaacaatgggtccgagatcttcagacctggaggaggcgatatgagggacaattggagaagtgaattatataaatataaagtagtaaaaattgaaccattaggagtagcacccaccaaggcaaagagaagagtggtgcagagagaaaaaagagcagtgggaataggagctttgttccttgggttcttgggagcagcaggaagcactatgggcgcagcgtcaatgacgctgacggtacaggccagacaattattgtctgatatagtgcagcagcagaacaatttgctgagggctattgaggcgcaacagcatctgttgcaactcacagtctggggcatcaaacagctccaggcaagaatcctggctgtggaaagatacctaaaggatcaacagctcctggggatttggggttgctctggaaaactcatttgcaccactgctgtgccttggaatgctagttggagtaataaatctctggaacagatttggaataacatgacctggatggagtgggacagagaaattaacaattacacaagcttaatacactccttaattgaagaatcgcaaaaccagcaagaaaagaatgaacaagaattattggaattagataaatgggcaagtttgtggaattggtttaacataacaaattggctgtggtatataaaattattcataatgatagtaggaggcttggtaggtttaagaatagtttttgctgtactttctatagtgaatagagttaggcagggatattcaccattatcgtttcagacccacctcccaatcccgaggggacccgacaggcccgaaggaatagaagaagaaggtggagagagagacagagacagatccattcgattagtgaacggatccttagcacttatctgggacgatctgcggagcctgtgcctcttcagctaccaccgcttgagagacttactcttgattgtaacgaggattgtggaacttctgggacgcagggggtgggaagccctcaaatattggtggaatctcctacagtattggagtcaggaactaaagaatagtgctgttaacttgctcaatgccacagccatagcagtagctgaggggacagatagggttatagaagtattacaagcagcttatagagctattcgccacatacctagaagaataagacagggcttggaaaggattttgctataagatgggtggcaagtggtcaaaaagtagtgtgattggatggcctgctgtaagggaaagaatgagacgagctgagccagcagcagatggggtgggagcagtatctcgagacctagaaaaacatggagcaatcacaagtagcaatacagcagctaacaatgctgcttgtgcctggctagaagcacaagaggaggaagaggtgggttttccagtcacacctcaggtacctttaagaccaatgacttacaaggcagctgtagatcttagccactttttaaaagaaaaggggggactggaagggctaattcactcccaaagaagacaagatatccttgatctgtggatctaccacacacaaggctacttccctgattggcagaactacacaccagggccaggggtcagatatccactgacctttggatggtgctacaagctagtaccagttgagccagataaggtagaagaggccaataaaggagagaacaccagcttgttacaccctgtgagcctgcatggaatggatgaccctgagagagaagtgttagagtggaggtttgacagccgcctagcatttcatcacgtggcccgagagctgcatccggagtacttcaagaactgctgacatcgagcttgctacaagggactttccgctggggactttccagggaggcgtggcctgggcgggactggggagtggcgagccctcagatgctgcatataagcagctgctttttgcctgtactgggtctctctggttagaccagatctgagcctgggagctctctggctaactagggaacccactgcttaagcctcaataaagcttgccttgagtgcttcaagtagtgtgtgcccgtctgttgtgtgactctggtaactagagatccctcagacccttttagtcagtgtggaaaatctctagca

SEQ ID NO: 95 - DNA, 7941 bp, Artificial Sequence
  Synthetic Sequence
tggaagggctaatttggtcccaaaaaagacaagagatccttgatctgtggatctaccacacacaaggctacttccctgattggcagaactacacaccagggccagggatcagatatccactgacctttggatggtgcttcaagttagtaccagttgaaccagagcaagtagaagaggccaatgaaggagagaacaacagcttgttacaccctatgagccagcatgggatggaggacccggagggagaagtattagtgtggaagtttgacagcctcctagcatttcgtcacatggcccgagagctgcatccggagtactacaaagactgctgacatcgagctttctacaagggactttccgctggggactttccagggaggtgtggcctgggcgggactggggagtggcgagccctcagatgctacatataagcagctgctttttgcctgtactgggtctctctggttagaccagatctgagcctgggagctctctggctaactagggaacccactgcttaagcctcaataaagcttgccttgagtgctcaaagtagtgtgtgcccgtctgttgtgtgactctggtaactagagatccctcagacccttttagtcagtgtggaaaatctctagcagtggcgcccgaacagggacttgaaagcgaaagtaaagccagaggagatctctcgacgcaggactcggcttgctgaagcgcgcacggcaagaggcgaggggcggcgactggtgagtacgccaaaaattttgactagcggaggctagaaggagagagatgggtgcgagagcgtcggtattaagcgggggagaattagataaatgggaaaaaattcggttaaggccagggggaaagaaacaatataaactaaaacatatagtatgggcaagcagggagctagaacgattcgcagttaatcctggccttttagagacatcagaaggctgtagacaaatactgggacagctacaaccatcccttcagacaggatcagaagaacttagatcattatataatacaatagcagtcctctattgtgtgcatcaaaggatagatgtaaaagacaccaaggaagccttagataagatagaggaagagcaaaacaaaagtaagaaaaaggcacagcaagcagcagctgacacaggaaacaacagccaggtcagccaaaattaccctatagtgcagaacctccaggggcaaatggtacatcaggccatatcacctagaactttaaatgcatgggtaaaagtagtagaagagaaggctttcagcccagaagtaatacccatgttttcagcattatcagaaggagccaccccacaagatttaaataccatgctaaacacagtggggggacatcaagcagccatgcaaatgttaaaagagaccatcaatgaggaagctgcagaatgggatagattgcatccagtgcatgcagggcctattgcaccaggccaaacgaatctgccgttgccatatgcagacattacactgtcgaatcgaacccttcatggacggtggaaaccaaaaatgatagggggaattggaggttttatcaaagtaagacagtatgatcagatactcatagaaatctgcggacataaagctataggtacagtattagtaggacctacacctgtcaacataattggaagaaatctgttgactcagattggctgcactttaaattttcccattagtcctattgagactgtaccagtaaaattaaagccaggaatggatggcccaaaagttaaacaatggccattgacagaagaaaaaataaaagcattagtagaaatttgtacagaaatggaaaaggaaggaaaaatttcaaaaattgggcctgaaaatccatacaatactccagtatttgccataaagaaaaaagacagtactaaatggagaaaattagtagatttcagagaacttaataagagaactcaagatttctgggaagttcaattaggaataccacatcctgcagggttaaaacagaaaaaatcagtaacagtactggatgtgggcgatgcatatttttcagttcccttagataaagacttcaggaagtatactgcatttaccatacctagtataaacaatgagacaccagggattagatatcagtacaatgtgcttccacagggatggaaaggatcaccagcaatattccagtgtagcatgacaaaaatcttagagccttttagaaaacaaaatccagacatagtcatctatcaatacatggatgatttgtatgtaggatctgacttagaaatagggcagcatagaacaaaaatagaggaactgagacaacatctgttgaggtggggatttaccacaccagacaaaaaacatcagaaagaacctccattcctttggatgggttatgaactccatcctgataaatggacagtacagcctatagtgctgccagaaaaggacagctggactgtcaatgacatacagaaattagtgggaaaattgaattgggcaagtcagatttatgcagggattaaagtaaggcaattatgtaaacttcttaggggaaccaaagcactaacagaagtagtaccactaacagaagaagcagagctagaactggcagaaaacagggagattctaaaagaaccggtacatggagtgtattatgacccatcaaaagacttaatagcagaaatacagaagcaggggcaaggccaatggacatatcaaatttatcaagagccatttaaaaatctgaaaacaggaaagtatgcaagaatgaagggtgcccacactaatgatgtgaaacaattaacagaggcagtacaaaaaatagccacagaaagcatagtaatatggggaaagactcctaaatttaaattacccatacaaaaggaaacatgggaagcatggtggacagagtattggcaagccacctggattcctgagtgggagtttgtcaatacccctcccttagtgaagttatggtaccagttagagaaagaacccataataggagcagaaactttctatgtagatggggcagccaatagggaaactaaattaggaaaagcaggatatgtaactgacagaggaagacaaaaagttgtccccctaacggacacaacaaatcagaagactgagttacaagcaattcatctagctttgcaggattcgggattagaagtaaacatagtgacagactcacaatatgcattgggaatcattcaagcacaaccagataagagtgaatcagagttagtcagtcaaataatagagcagttaataaaaaaggaaaaagtctacctggcatgggtaccagcacacaaaggaattggaggaaatgaacaagtagataaattggtcagtgctggaatcaggaaagtactatttttagatggaatagataaggcccaagaagaacatgagaaatatcacagtaattggagagcaatggctagtgattttaacctaccacctgtagtagcaaaagaaatagtagccagctgtgataaatgtcagctaaaaggggaagccatgcatggacaagtagactgtagcccaggaatatggcagctagattgtacacatttagaaggaaaagttatcttggtagcagttcatgtagccagtggatatatagaagcagaagtaattccagcagagacagggcaagaaacagcatacttcctcttaaaattagcaggaagatggccagtaaaaacagtacatacagacaatggcagcaatttcaccagtactacagttaaggccgcctgttggtgggcggggatcaagcaggaatttggcattccctacaatccccaaagtcaaggagtaatagaatctatgaataaagaattaaagaaaattataggacaggtaagagatcaggctgaacatcttaagacagcagtacaaatggcagtattcatccacaattttaaaagaaaaggggggattggggggtacagtgcaggggaaagaatagtagacataatagcaacagacatacaaactaaagaattacaaaaacaaattacaaaaattcaaaattttcgggtttattacagggacagcagagatccagtttggaaaggaccagcaaagctcctctggaaaggtgaaggggcagtagtaatacaagataatagtgacataaaagtagtgccaagaagaaaagcaaagatcatcagggattatggaaaacagatggcaggtgatgattgtgtggcccgtccatgaagggttcgattcttgaacagcgcggtctgttatggcaacggcagattcgtttaatgcaacctataatagtagcaatagtagcattagtagtagcaataataatagcaatagttgtgtggtccatagtaatcatagaatataggaaaatattaagacaaagaaaaatagacaggttaattgatagactaatagaaagagcagaagacagtggcaatgagagtgaaggagaagtatcagcacttgtggagatgggggtggaaatggggcaccatgctccttgggatattgatgatctgtagtgctacagaaaaattgtgggtcacagtctattatggggtacctgtgtggaaggaagcaaccaccactctattttgtgcatcagatgctaaagcatatgatacagaggtacataatgtttgggccacacatgcctgtgtacccacagaccccaacccacaagaagtagtattggtaaatgtgacagaaaattttaacatgtggaaaaatgacatggtagaacagatgcatgaggatataatcagtttatgggatcaaagcctaaagccatgtgtaaaattaaccccactctgtgttagtttaaagtgcactgatttgaagaatgatactaataccaatagtagtagcgggagaatgataatggagaaaggagagataaaaaactgctctttcaatatcagcacaagcataagagataaggtgcagaaagaatatgcattcttttataaacttgatatagtaccaatagataataccagctataggttgataagttgtaacacctcagtcattacacaggcctgtccaaaggtatcctttgagccaattcccatacattattgtgccccggctggttttgcgattctaaaatgtaataataagacgttcaatggaacaggaccatgtacaaatgtcagcacagtacaatgtacacatggaatcaggccagtagtatcaactcaactgctgttaaatggcagtctagcagaagaagatgtagtaattagatctgccaatttcacagacaatgctaaaaccataatagtacagctgaacacatctgtagaaattaattgtacaagacccaacaacaatacaagaaaaagtatccgtatccagaggggaccagggagagcatttgttacaataggaaaaataggaaatatgagacaagcacattgtaacattagtagagcaaaatggaatgccactttaaaacagatagctagcaaattaagagaacaatttggaaataataaaacaataatctttaagcaatcctcaggaggggacccagaaattgtaacgcacagttttaattgtggaggggaatttttctactgtaattcaacacaactgtttaatagtacttggtttaatagtacttggagtactgaagggtcaaataacactgaaggaagtgacacaatcacactcccatgcagaataaaacaatttataaacatgtggcaggaagtaggaaaagcaatgtatgcccctcccatcagtggacaaattagatgttcatcaaatattactgggctgctattaacaagagatggtggtaataacaacaatgggtccgagatcttcagacctggaggaggcgatatgagggacaattggagaagtgaattatataaatataaagtagtaaaaattgaaccattaggagtagcacccaccaaggcaaagagaagagtggtgcagagagaaaaaagagcagtgggaataggagctttgttccttgggttcttgggagcagcaggaagcactatgggcgcagcgtcaatgacgctgacggtacaggccagacaattattgtctgatatagtgcagcagcagaacaatttgctgagggctattgaggcgcaacagcatctgttgcaactcacagtctggggcatcaaacagctccaggcaagaatcctggctgtggaaagatacctaaaggatcaacagctcctggggatttggggttgctctggaaaactcatttgcaccactgctgtgccttggaatgctagttggagtaataaatctctggaacagatttggaataacatgacctggatggagtgggacagagaaattaacaattacacaagcttaatacactccttaattgaagaatcgcaaaaccagcaagaaaagaatgaacaagaattattggaattagataaatgggcaagtttgtggaattggtttaacataacaaattggctgtggtatataaaattattcataatgatagtaggaggcttggtaggtttaagaatagtttttgctgtactttctatagtgaatagagttaggcagggatattcaccattatcgtttcagacccacctcccaatcccgaggggacccgacaggcccgaaggaatagaagaagaaggtggagagagagacagagacagatccattcgattagtgaacggatccttagcacttatctgggacgatctgcggagcctgtgcctcttcagctaccaccgcttgagagacttactcttgattgtaacgaggattgtggaacttctgggacgcagggggtgggaagccctcaaatattggtggaatctcctacagtattggagtcaggaactaaagaatagtgctgttaacttgctcaatgccacagccatagcagtagctgaggggacagatagggttatagaagtattacaagcagcttatagagctattcgccacatacctagaagaataagacagggcttggaaaggattttgctataagatgggtggcaagtggtcaaaaagtagtgtgattggatggcctgctgtaagggaaagaatgagacgagctgagccagcagcagatggggtgggagcagtatctcgagacctagaaaaacatggagcaatcacaagtagcaatacagcagctaacaatgctgcttgtgcctggctagaagcacaagaggaggaagaggtgggttttccagtcacacctcaggtacctttaagaccaatgacttacaaggcagctgtagatcttagccactttttaaaagaaaaggggggactggaagggctaattcactcccaaagaagacaagatatccttgatctgtggatctaccacacacaaggctacttccctgattggcagaactacacaccagggccaggggtcagatatccactgacctttggatggtgctacaagctagtaccagttgagccagataaggtagaagaggccaataaaggagagaacaccagcttgttacaccctgtgagcctgcatggaatggatgaccctgagagagaagtgttagagtggaggtttgacagccgcctagcatttcatcacgtggcccgagagctgcatccggagtacttcaagaactgctgacatcgagcttgctacaagggactttccgctggggactttccagggaggcgtggcctgggcgggactggggagtggcgagccctcagatgctgcatataagcagctgctttttgcctgtactgggtctctctggttagaccagatctgagcctgggagctctctggctaactagggaacccactgcttaagcctcaataaagcttgccttgagtgcttcaagtagtgtgtgcccgtctgttgtgtgactctggtaactagagatccctcagacccttttagtcagtgtggaaaatctctagca

SEQ ID NO: 96 - DNA, 7716 bp, Artificial Sequence
  Synthetic Sequence
tggaagggctaatttggtcccaaaaaagacaagagatccttgatctgtggatctaccacacacaaggctacttccctgattggcagaactacacaccagggccagggatcagatatccactgacctttggatggtgcttcaagttagtaccagttgaaccagagcaagtagaagaggccaatgaaggagagaacaacagcttgttacaccctatgagccagcatgggatggaggacccggagggagaagtattagtgtggaagtttgacagcctcctagcatttcgtcacatggcccgagagctgcatccggagtactacaaagactgctgacatcgagctttctacaagggactttccgctggggactttccagggaggtgtggcctgggcgggactggggagtggcgagccctcagatgctacatataagcagctgctttttgcctgtactgggtctctctggttagaccagatctgagcctgggagctctctggctaactagggaacccactgcttaagcctcaataaagcttgccttgagtgctcaaagtagtgtgtgcccgtctgttgtgtgactctggtaactagagatccctcagacccttttagtcagtgtggaaaatctctagcagtggcgcccgaacagggacttgaaagcgaaagtaaagccagaggagatctctcgacgcaggactcggcttgctgaagcgcgcacggcaagaggcgaggggcggcgactggtgagtacgccaaaaattttgactagcggaggctagaaggagagagatgggtgcgagagcgtcggtattaagcgggggagaattagataaatgggaaaaaattcggttaaggccagggggaaagaaacaatataaactaaaacatatagtatgggcaagcagggagctagaacgattcgcagttaatcctggccttttagagacatcagaaggctgtagacaaatactgggacagctacaaccatcccttcagacaggatcagaagaacttagatcattatataatacaatagcagtcctctattgtgtgcatcaaaggatagatgtaaaagacaccaaggaagccttagataagatagaggaagagcaaaacaaaagtaagaaaaaggcacagcaagcagcagctgacacaggaaacaacagccaggtcagccaaaattaccctatagtgcagaacctccaggggcaaatggtacatcaggccatatcacctagaactttaaatgcatgggtaaaagtagtagaagagaaggctttcagcccagaagtaatacccatgttttcagcattatcagaaggagccaccccacaagatttaaataccatgctaaacacagtggggggacatcaagcagccatgcaaatgttaaaagagaccatcaatgaggaagctgcagaatgggatagattgcatccagtgcatgcagggcctattgcaccaggccaaacgaatctgccgttgccatatgcagacattacactgtcgaatcgaacccttcatggacggtggaaaccaaaaatgatagggggaattggaggttttatcaaagtaagacagtatgatcagatactcatagaaatctgcggacataaagctataggtacagtattagtaggacctacacctgtcaacataattggaagaaatctgttgactcagattggctgcactttaaattttcccattagtcctattgagactgtaccagtaaaattaaagccaggaatggatggcccaaaagttaaacaatggccattgacagaagaaaaaataaaagcattagtagaaatttgtacagaaatggaaaaggaaggaaaaatttcaaaaattgggcctgaaaatccatacaatactccagtatttgccataaagaaaaaagacagtactaaatggagaaaattagtagatttcagagaacttaataagagaactcaagatttctgggaagttcaattaggaataccacatcctgcagggttaaaacagaaaaaatcagtaacagtactggatgtgggcgatgcatatttttcagttcccttagataaagacttcaggaagtatactgcatttaccatacctagtataaacaatgagacaccagggattagatatcagtacaatgtgcttccacagggatggaaaggatcaccagcaatattccagtgtagcatgacaaaaatcttagagccttttagaaaacaaaatccagacatagtcatctatcaatacatggatgatttgtatgtaggatctgacttagaaatagggcagcatagaacaaaaatagaggaactgagacaacatctgttgaggtggggatttaccacaccagacaaaaaacatcagaaagaacctccattcctttggatgggttatgaactccatcctgataaatggacagtacagcctatagtgctgccagaaaaggacagctggactgtcaatgacatacagaaattagtgggaaaattgaattgggcaagtcagatttatgcagggattaaagtaaggcaattatgtaaacttcttaggggaaccaaagcactaacagaagtagtaccactaacagaagaagcagagctagaactggcagaaaacagggagattctaaaagaaccggtacatggagtgtattatgacccatcaaaagacttaatagcagaaatacagaagcaggggcaaggccaatggacatatcaaatttatcaagagccatttaaaaatctgaaaacaggaaagtatgcaagaatgaagggtgcccacactaatgatgtgaaacaattaacagaggcagtacaaaaaatagccacagaaagcatagtaatatggggaaagactcctaaatttaaattacccatacaaaaggaaacatgggaagcatggtggacagagtattggcaagccacctggattcctgagtgggagtttgtcaatacccctcccttagtgaagttatggtaccagttagagaaagaacccataataggagcagaaactttctatgtagatggggcagccaatagggaaactaaattaggaaaagcaggatatgtaactgacagaggaagacaaaaagttgtccccctaacggacacaacaaatcagaagactgagttacaagcaattcatctagctttgcaggattcgggattagaagtaaacatagtgacagactcacaatatgcattgggaatcattcaagcacaaccagataagagtgaatcagagttagtcagtcaaataatagagcagttaataaaaaaggaaaaagtctacctggcatgggtaccagcacacaaaggaattggaggaaatgaacaagtagataaattggtcagtgctggaatcaggaaagtactatttttagatggaatagataaggcccaagaagaacatgagaaatatcacagtaattggagagcaatggctagtgattttaacctaccacctgtagtagcaaaagaaatagtagccagctgtgataaatgtcagctaaaaggggaagccatgcatggacaagtagactgtagcccaggaatatggcagctagattgtacacatttagaaggaaaagttatcttggtagcagttcatgtagccagtggatatatagaagcagaagtaattccagcagagacagggcaagaaacagcatacttcctcttaaaattagcaggaagatggccagtaaaaacagtacatacagacaatggcagcaatttcaccagtactacagttaaggccgcctgttggtgggcggggatcaagcaggaatttggcattccctacaatccccaaagtcaaggagtaatagaatctatgaataaagaattaaagaaaattataggacaggtaagagatcaggctgaacatcttaagacagcagtacaaatggcagtattcatccacaattttaaaagaaaaggggggattggggggtacagtgcaggggaaagaatagtagacataatagcaacagacatacaaactaaagaattacaaaaacaaattacaaaaattcaaaattttcgggtttattacagggacagcagagatccagtttggaaaggaccagcaaagctcctctggaaaggtgaaggggcagtagtaatacaagataatagtgacataaaagtagtgccaagaagaaaagcaaagatcatcagggattaaccgtccatgaagggttcgattatctgtagccaacattcgatatggcaacggcagattcgttggagatgggggtggaaatggggcaccatgctccttgggatattgatgatctgtagtgctacagaaaaattgtgggtcacagtctattatggggtacctgtgtggaaggaagcaaccaccactctattttgtgcatcagatgctaaagcatatgatacagaggtacataatgtttgggccacacatgcctgtgtacccacagaccccaacccacaagaagtagtattggtaaatgtgacagaaaattttaacatgtggaaaaatgacatggtagaacagatgcatgaggatataatcagtttatgggatcaaagcctaaagccatgtgtaaaattaaccccactctgtgttagtttaaagtgcactgatttgaagaatgatactaataccaatagtagtagcgggagaatgataatggagaaaggagagataaaaaactgctctttcaatatcagcacaagcataagagataaggtgcagaaagaatatgcattcttttataaacttgatatagtaccaatagataataccagctataggttgataagttgtaacacctcagtcattacacaggcctgtccaaaggtatcctttgagccaattcccatacattattgtgccccggctggttttgcgattctaaaatgtaataataagacgttcaatggaacaggaccatgtacaaatgtcagcacagtacaatgtacacatggaatcaggccagtagtatcaactcaactgctgttaaatggcagtctagcagaagaagatgtagtaattagatctgccaatttcacagacaatgctaaaaccataatagtacagctgaacacatctgtagaaattaattgtacaagacccaacaacaatacaagaaaaagtatccgtatccagaggggaccagggagagcatttgttacaataggaaaaataggaaatatgagacaagcacattgtaacattagtagagcaaaatggaatgccactttaaaacagatagctagcaaattaagagaacaatttggaaataataaaacaataatctttaagcaatcctcaggaggggacccagaaattgtaacgcacagttttaattgtggaggggaatttttctactgtaattcaacacaactgtttaatagtacttggtttaatagtacttggagtactgaagggtcaaataacactgaaggaagtgacacaatcacactcccatgcagaataaaacaatttataaacatgtggcaggaagtaggaaaagcaatgtatgcccctcccatcagtggacaaattagatgttcatcaaatattactgggctgctattaacaagagatggtggtaataacaacaatgggtccgagatcttcagacctggaggaggcgatatgagggacaattggagaagtgaattatataaatataaagtagtaaaaattgaaccattaggagtagcacccaccaaggcaaagagaagagtggtgcagagagaaaaaagagcagtgggaataggagctttgttccttgggttcttgggagcagcaggaagcactatgggcgcagcgtcaatgacgctgacggtacaggccagacaattattgtctgatatagtgcagcagcagaacaatttgctgagggctattgaggcgcaacagcatctgttgcaactcacagtctggggcatcaaacagctccaggcaagaatcctggctgtggaaagatacctaaaggatcaacagctcctggggatttggggttgctctggaaaactcatttgcaccactgctgtgccttggaatgctagttggagtaataaatctctggaacagatttggaataacatgacctggatggagtgggacagagaaattaacaattacacaagcttaatacactccttaattgaagaatcgcaaaaccagcaagaaaagaatgaacaagaattattggaattagataaatgggcaagtttgtggaattggtttaacataacaaattggctgtggtatataaaattattcataatgatagtaggaggcttggtaggtttaagaatagtttttgctgtactttctatagtgaatagagttaggcagggatattcaccattatcgtttcagacccacctcccaatcccgaggggacccgacaggcccgaaggaatagaagaagaaggtggagagagagacagagacagatccattcgattagtgaacggatccttagcacttatctgggacgatctgcggagcctgtgcctcttcagctaccaccgcttgagagacttactcttgattgtaacgaggattgtggaacttctgggacgcagggggtgggaagccctcaaatattggtggaatctcctacagtattggagtcaggaactaaagaatagtgctgttaacttgctcaatgccacagccatagcagtagctgaggggacagatagggttatagaagtattacaagcagcttatagagctattcgccacatacctagaagaataagacagggcttggaaaggattttgctataagatgggtggcaagtggtcaaaaagtagtgtgattggatggcctgctgtaagggaaagaatgagacgagctgagccagcagcagatggggtgggagcagtatctcgagacctagaaaaacatggagcaatcacaagtagcaatacagcagctaacaatgctgcttgtgcctggctagaagcacaagaggaggaagaggtgggttttccagtcacacctcaggtacctttaagaccaatgacttacaaggcagctgtagatcttagccactttttaaaagaaaaggggggactggaagggctaattcactcccaaagaagacaagatatccttgatctgtggatctaccacacacaaggctacttccctgattggcagaactacacaccagggccaggggtcagatatccactgacctttggatggtgctacaagctagtaccagttgagccagataaggtagaagaggccaataaaggagagaacaccagcttgttacaccctgtgagcctgcatggaatggatgaccctgagagagaagtgttagagtggaggtttgacagccgcctagcatttcatcacgtggcccgagagctgcatccggagtacttcaagaactgctgacatcgagcttgctacaagggactttccgctggggactttccagggaggcgtggcctgggcgggactggggagtggcgagccctcagatgctgcatataagcagctgctttttgcctgtactgggtctctctggttagaccagatctgagcctgggagctctctggctaactagggaacccactgcttaagcctcaataaagcttgccttgagtgcttcaagtagtgtgtgcccgtctgttgtgtgactctggtaactagagatccctcagacccttttagtcagtgtggaaaatctctagca

SEQ ID NO: 97 - DNA, 7940 bp, Artificial Sequence
  Synthetic Sequence
tggaagggctaatttggtcccaaaaaagacaagagatccttgatctgtggatctaccacacacaaggctacttccctgattggcagaactacacaccagggccagggatcagatatccactgacctttggatggtgcttcaagttagtaccagttgaaccagagcaagtagaagaggccaatgaaggagagaacaacagcttgttacaccctatgagccagcatgggatggaggacccggagggagaagtattagtgtggaagtttgacagcctcctagcatttcgtcacatggcccgagagctgcatccggagtactacaaagactgctgacatcgagctttctacaagggactttccgctggggactttccagggaggtgtggcctgggcgggactggggagtggcgagccctcagatgctacatataagcagctgctttttgcctgtactgggtctctctggttagaccagatctgagcctgggagctctctggctaactagggaacccactgcttaagcctcaataaagcttgccttgagtgctcaaagtagtgtgtgcccgtctgttgtgtgactctggtaactagagatccctcagacccttttagtcagtgtggaaaatctctagcagtggcgcccgaacagggacttgaaagcgaaagtaaagccagaggagatctctcgacgcaggactcggcttgctgaagcgcgcacggcaagaggcgaggggcggcgactggtgagtacgccaaaaattttgactagcggaggctagaaggagagagatgggtgcgagagcgtcggtattaagcgggggagaattagataaatgggaaaaaattcggttaaggccagggggaaagaaacaatataaactaaaacatatagtatgggcaagcagggagctagaacgattcgcagttaatcctggccttttagagacatcagaaggctgtagacaaatactgggacagctacaaccatcccttcagacaggatcagaagaacttagatcattatataatacaatagcagtcctctattgtgtgcatcaaaggatagatgtaaaagacaccaaggaagccttagataagatagaggaagagcaaaacaaaagtaagaaaaaggcacagcaagcagcagctgacacaggaaacaacagccaggtcagccaaaattaccctatagtgcagaacctccaggggcaaatggtacatcaggccatatcacctagaactttaaatgcatgggtaaaagtagtagaagagaaggctttcagcccagaagtaatacccatgttttcagcattatcagaaggagccaccccacaagatttaaataccatgctaaacacagtggggggacatcaagcagccatgcaaatgttaaaagagaccatcaatgaggaagctgcagaatgggatagattgcatccagtgcatgcagggcctattgcaccaggccaaacgaatctgccgttgccatatgcagacattacactgtcgaatcgaacccttcatggacggtggaaaccaaaaatgatagggggaattggaggttttatcaaagtaagacagtatgatcagatactcatagaaatctgcggacataaagctataggtacagtattagtaggacctacacctgtcaacataattggaagaaatctgttgactcagattggctgcactttaaattttcccattagtcctattgagactgtaccagtaaaattaaagccaggaatggatggcccaaaagttaaacaatggccattgacagaagaaaaaataaaagcattagtagaaatttgtacagaaatggaaaaggaaggaaaaatttcaaaaattgggcctgaaaatccatacaatactccagtatttgccataaagaaaaaagacagtactaaatggagaaaattagtagatttcagagaacttaataagagaactcaagatttctgggaagttcaattaggaataccacatcctgcagggttaaaacagaaaaaatcagtaacagtactggatgtgggcgatgcatatttttcagttcccttagataaagacttcaggaagtatactgcatttaccatacctagtataaacaatgagacaccagggattagatatcagtacaatgtgcttccacagggatggaaaggatcaccagcaatattccagtgtagcatgacaaaaatcttagagccttttagaaaacaaaatccagacatagtcatctatcaatacatggatgatttgtatgtaggatctgacttagaaatagggcagcatagaacaaaaatagaggaactgagacaacatctgttgaggtggggatttaccacaccagacaaaaaacatcagaaagaacctccattcctttggatgggttatgaactccatcctgataaatggacagtacagcctatagtgctgccagaaaaggacagctggactgtcaatgacatacagaaattagtgggaaaattgaattgggcaagtcagatttatgcagggattaaagtaaggcaattatgtaaacttcttaggggaaccaaagcactaacagaagtagtaccactaacagaagaagcagagctagaactggcagaaaacagggagattctaaaagaaccggtacatggagtgtattatgacccatcaaaagacttaatagcagaaatacagaagcaggggcaaggccaatggacatatcaaatttatcaagagccatttaaaaatctgaaaacaggaaagtatgcaagaatgaacgaatctgccgttgccatatacagcatctgaacaagctgatcgaacccttcatggacggttaaggccgcctgttggtgggcggggatcaagcaggaatttggcattccctacaatccccaaagtcaaggagtaatagaatctatgaataaagaattaaagaaaattataggacaggtaagagatcaggctgaacatcttaagacagcagtacaaatggcagtattcatccacaattttaaaagaaaaggggggattggggggtacagtgcaggggaaagaatagtagacataatagcaacagacatacaaactaaagaattacaaaaacaaattacaaaaattcaaaattttcgggtttattacagggacagcagagatccagtttggaaaggaccagcaaagctcctctggaaaggtgaaggggcagtagtaatacaagataatagtgacataaaagtagtgccaagaagaaaagcaaagatcatcagggattatggaaaacagatggcaggtgatgattgtgtggcaagtagacaggatgaggattaacacatggaaaagattagtaaaacaccatatgtatatttcaaggaaagctaaggactggttttatagacatcactatgaaagtactaatccaaaaataagttcagaagtacacatcccactaggggatgctaaattagtaataacaacatattggggtctgcatacaggagaaagagactggcatttgggtcagggagtctccatagaatggaggaaaaagagatatagcacacaagtagaccctgacctagcagaccaactaattcatctgcactattttgattgtttttcagaatctgctataagaaataccatattaggacgtatagttagtcctaggtgtgaatatcaagcaggacataacaaggtaggatctctacagtacttggcactagcagcattaataaaaccaaaacagataaagccacctttgcctagtgttaggaaactgacagaggacagatggaacaagccccagaagaccaagggccacagagggagccatacaatgaatggacactagagcttttagaggaacttaagagtgaagctgttagacattttcctaggatatggctccataacttaggacaacatatctatgaaacttacggggatacttgggcaggagtggaagccataataagaattctgcaacaactgctgtttatccatttcagaattgggtgtcgacatagcagaataggcgttactcgacagaggagagcaagaaatggagccagtagatcctagactagagccctggaagcatccaggaagtcagcctaaaactgcttgtaccaattgctattgtaaaaagtgttgctttcattgccaagtttgtttcatgacaaaagccttaggcatctcctatggcaggaagaagcggagacagcgacgaagagctcatcagaacagtcagactcatcaagcttctctatcaaagcagtaagtagtacatgtaatgcaacctataatagtagcaatagtagcattagtagtagcaataataatagcaatagttgtgtggtccatagtaatcatagaatataggaaaatattaagacaaagaaaaatagacaggttaattgatagactaatagaaagagcagaagacagtggcaatgagagtgaaggagaagtatcagcacttgtggagatgggggtggaaatggggcaccatgctccttgggatattgatgatctgtagtgctacagaaaaattgtgggtcacagtctattatggggtacctgtgtggaaggaagcaaccaccactctattttgtgcatcagatgctaaagcatatgatacagaggtacataatgtttgggccacacatgcctgtgtacccacagaccccaacccacaagaagtagtattggtaaatgtgacagaaaattttaacatgtggaaaaatgacatggtagaacagatgcatgaggatataatcagtttatgggatcaaagcctaaagccatgtgtaaaattaaccccactctgtgttagtttaaagtgcactgatttgaagaatgatactaataccaatagtagtagcgggagaatgataatggagaaaggagagataaaaaactgctctttcaatatcagcacaagcataagagataaggtgcagaaagaatatgcattcttttataaacttgatatagtaccaatagataataccagctataggttgataagttgtaacacctcagtcattacacaggcctgtccaaaggtatcctttgagccaattcccatacattattgtgccccggctggttttgcgattctaaaatgtaataataagacgttcaatggaacaggaccatgtacaaatgtcagcacagtacaatgtacacatggaatcaggccagtagtatcaactcaactgctgttaaatggcagtctagcagaagaagatgtagtaattagatctgccaatttcacagacaatgctaaaaccataatagtacagctgaacacatctgtagaaattaattgtacaagacccaacaacaatacaagaaaaagtatccgtatccagaggggaccagggagagcatttgttacaataggaaaaataggaaatatgagacaagcacattgtaacattagtagagcaaaatggaatgccactttaaaacagatagctagcaaattaagagaacaatttggaaataataaaacaataatctttaagcaatcctcaggaggggacccagaaattgtaacgcacagttttaattgtggaggggaatttttctactgtaattcaacacaactgtttaatagtacttggtttaatagtacttggagtactgaagggtcaaataacactgaaggaagtgacacaatcacactcccatgcagaataaaacaatttataaacatgtggcaggaagtaggaaaagcaatgtatgcccctcccatcagtggacaaattagatgttcatcaaatattactgggctgctattaacaagagatggtggtaataacaacaatgggtccgagatcttcagacctggaggaggcgatatgagggacaattggagaagtgaattatataaatataaagtagtaaaaattgaaccattaggagtagcacccaccaaggcaaagagaagagtggtgcagagagaaaaaagagcagtgggaataggagctttgttccttgggttcttgggagcagcaggaagcactatgggcgcagcgtcaatgacgctgacggtacaggccagacaattattgtctgatatagtgcagcagcagaacaatttgctgagggctattgaggcgcaacagcatctgttgcaactcacagtctggggcatcaaacagctccaggcaagaatcctggctgtggaaagatacctaaaggatcaacagctcctggggatttggggttgctctggaaaactcatttgcaccactgctgtgccttggaatgctagttggagtaataaatctctggaacagatttggaataacatgacctggatggagtgggacagagaaattaacaattacacaagcttaatacactccttaattgaagaatcgcaaaaccagcaagaaaagaatgaacaagaattattggaattagataaatgggcaagtttgtggaattggtttaacataacaaattggctgtggtatataaaattattcataatgatagtaggaggcttggtaggtttaagaatagtttttgctgtactttctatagtgaatagagttaggcagggatattcaccattatcgtttcagacccacctcccaatcccgaggggacccgacaggcccgaaggaatagaagaagaaggtggagagagagacagagacagatccattcgattagtgaacggatccttagcacttatctgggacgatctgcggagcctgtgcctcttcagctaccaccgcttgagagacttactcttgattgtaacgaggattgtggaacttctgggacgcagggggtgggaagccctcaaatattggtggaatctcctacagtattggagtcaggaactaaagaatagtgctgttaacttgctcaatgccacagccatagcagtagctgaggggacagatagggttatagaagtattacaagcagcttatagagctattcgccacatacctagaagaataagacagggcttggaaaggattttgctataagatgggtggcaagtggtcaaaaagtagtgtgattggatggcctgctgtaagggaaagaatgagacgagctgagccagcagcagatggggtgggagcagtatctcgagacctagaaaaacatggagcaatcacaagtagcaatacagcagctaacaatgctgcttgtgcctggctagaagcacaagaggaggaagaggtgggttttccagtcacacctcaggtacctttaagaccaatgacttacaaggcagctgtagatcttagccactttttaaaagaaaaggggggactggaagggctaattcactcccaaagaagacaagatatccttgatctgtggatctaccacacacaaggctacttccctgattggcagaactacacaccagggccaggggtcagatatccactgacctttggatggtgctacaagctagtaccagttgagccagataaggtagaagaggccaataaaggagagaacaccagcttgttacaccctgtgagcctgcatggaatggatgaccctgagagagaagtgttagagtggaggtttgacagccgcctagcatttcatcacgtggcccgagagctgcatccggagtacttcaagaactgctgacatcgagcttgctacaagggactttccgctggggactttccagggaggcgtggcctgggcgggactggggagtggcgagccctcagatgctgcatataagcagctgctttttgcctgtactgggtctctctggttagaccagatctgagcctgggagctctctggctaactagggaacccactgcttaagcctcaataaagcttgccttgagtgcttcaagtagtgtgtgcccgtctgttgtgtgactctggtaactagagatccctcagacccttttagtcagtgtggaaaatctctagca

SEQ ID NO: 98 - DNA, 7017 bp, Artificial Sequence
  Synthetic Sequence
tggaagggctaatttggtcccaaaaaagacaagagatccttgatctgtggatctaccacacacaaggctacttccctgattggcagaactacacaccagggccagggatcagatatccactgacctttggatggtgcttcaagttagtaccagttgaaccagagcaagtagaagaggccaatgaaggagagaacaacagcttgttacaccctatgagccagcatgggatggaggacccggagggagaagtattagtgtggaagtttgacagcctcctagcatttcgtcacatggcccgagagctgcatccggagtactacaaagactgctgacatcgagctttctacaagggactttccgctggggactttccagggaggtgtggcctgggcgggactggggagtggcgagccctcagatgctacatataagcagctgctttttgcctgtactgggtctctctggttagaccagatctgagcctgggagctctctggctaactagggaacccactgcttaagcctcaataaagcttgccttgagtgctcaaagtagtgtgtgcccgtctgttgtgtgactctggtaactagagatccctcagacccttttagtcagtgtggaaaatctctagcagtggcgcccgaacagggacttgaaagcgaaagtaaagccagaggagatctctcgacgcaggactcggcttgctgaagcgcgcacggcaagaggcgaggggcggcgactggtgagtacgccaaaaattttgactagcggaggctagaaggagagagatgggtgcgagagcgtcggtattaagcgggggagaattagataaatgggaaaaaattcggttaaggccagggggaaagaaacaatataaactaaaacatatagtatgggcaagcagggagctagaacgattcgcagttaatcctggccttttagagacatcagaaggctgtagacaaatactgggacagctacaaccatcccttcagacaggatcagaagaacttagatcattatataatacaatagcagtcctctattgtgtgcatcaaaggatagatgtaaaagacaccaaggaagccttagataagatagaggaagagcaaaacaaaagtaagaaaaaggcacagcaagcagcagctgacacaggaaacaacagccaggtcagccaaaattaccctatagtgcagaacctccaggggcaaatggtacatcaggccatatcacctagaactttaaatgcatgggtaaaagtagtagaagagaaggctttcagcccagaagtaatacccatgttttcagcattatcagaaggagccaccccacaagatttaaataccatgctaaacacagtggggggacatcaagcagccatgcaaatgttaaaagagaccatcaatgaggaagctgcagaatgggatagattgcatccagtgcatgcagggcctattgcaccaggccaaacgaatctgccgttgccatatgcagacattacactgtcgaatcgaacccttcatggacggtggaaaccaaaaatgatagggggaattggaggttttatcaaagtaagacagtatgatcagatactcatagaaatctgcggacataaagctataggtacagtattagtaggacctacacctgtcaacataattggaagaaatctgttgactcagattggctgcactttaaattttcccattagtcctattgagactgtaccagtaaaattaaagccaggaatggatggcccaaaagttaaacaatggccattgacagaagaaaaaataaaagcattagtagaaatttgtacagaaatggaaaaggaaggaaaaatttcaaaaattgggcctgaaaatccatacaatactccagtatttgccataaagaaaaaagacagtactaaatggagaaaattagtagatttcagagaacttaataagagaactcaagatttctgggaagttcaattaggaataccacatcctgcagggttaaaacagaaaaaatcagtaacagtactggatgtgggcgatgcatatttttcagttcccttagataaagacttcaggaagtatactgcatttaccatacctagtataaacaatgagacaccagggattagatatcagtacaatgtgcttccacagggatggaaaggatcaccagcaatattccagtgtagcatgacaaaaatcttagagccttttagaaaacaaaatccagacatagtcatctatcaatacatggatgatttgtatgtaggatctgacttagaaatagggcagcatagaacaaaaatagaggaactgagacaacatctgttgaggtggggatttaccacaccagacaaaaaacatcagaaagaacctccattcctttggatgggttatgaactccatcctgataaatggacagtacagcctatagtgctgccagaaaaggacagctggactgtcaatgacatacagaaattagtgggaaaattgaattgggcaagtcagatttatgcagggattaaagtaaggcaattatgtaaacttcttaggggaaccaaagcactaacagaagtagtaccactaacagaagaagcagagctagaactggcagaaaacagggagattctaaaagaaccggtacatggagtgtattatgacccatcaaaagacttaatagcagaaatacagaagcaggggcaaggccaatggacatatcaaatttatcaagagccatttaaaaatctgaaaacaggaaagtatgcaagaatgaacgaatctgccgttgccatatacagcatctgaacaagctgatcgaacccttcatggacggttaaggccgcctgttggtgggcggggatcaagcaggaatttggcattccctacaatccccaaagtcaaggagtaatagaatctatgaataaagaattaaagaaaattataggacaggtaagagatcaggctgaacatcttaagacagcagtacaaatggcagtattcatccacaattttaaaagaaaaggggggattggggggtacagtgcaggggaaagaatagtagacataatagcaacagacatacaaactaaagaattacaaaaacaaattacaaaaattcaaaattttcgggtttattacagggacagcagagatccagtttggaaaggaccagcaaagctcctctggaaaggtgaaggggcagtagtaatacaagataatagtgacataaaagtagtgccaagaagaaaagcaaagatcatcagggattatggaaaacagatggcaggtgatgattgtgtggcccgtccatgaagggttcgattcttgaacagcgcggtctgttatggcaacggcagattcgtttaatgcaacctataatagtagcaatagtagcattagtagtagcaataataatagcaatagttgtgtggtccatagtaatcatagaatataggaaaatattaagacaaagaaaaatagacaggttaattgatagactaatagaaagagcagaagacagtggcaatgagagtgaaggagaagtatcagcacttgtggagatgggggtggaaatggggcaccatgctccttgggatattgatgatctgtagtgctacagaaaaattgtgggtcacagtctattatggggtacctgtgtggaaggaagcaaccaccactctattttgtgcatcagatgctaaagcatatgatacagaggtacataatgtttgggccacacatgcctgtgtacccacagaccccaacccacaagaagtagtattggtaaatgtgacagaaaattttaacatgtggaaaaatgacatggtagaacagatgcatgaggatataatcagtttatgggatcaaagcctaaagccatgtgtaaaattaaccccactctgtgttagtttaaagtgcactgatttgaagaatgatactaataccaatagtagtagcgggagaatgataatggagaaaggagagataaaaaactgctctttcaatatcagcacaagcataagagataaggtgcagaaagaatatgcattcttttataaacttgatatagtaccaatagataataccagctataggttgataagttgtaacacctcagtcattacacaggcctgtccaaaggtatcctttgagccaattcccatacattattgtgccccggctggttttgcgattctaaaatgtaataataagacgttcaatggaacaggaccatgtacaaatgtcagcacagtacaatgtacacatggaatcaggccagtagtatcaactcaactgctgttaaatggcagtctagcagaagaagatgtagtaattagatctgccaatttcacagacaatgctaaaaccataatagtacagctgaacacatctgtagaaattaattgtacaagacccaacaacaatacaagaaaaagtatccgtatccagaggggaccagggagagcatttgttacaataggaaaaataggaaatatgagacaagcacattgtaacattagtagagcaaaatggaatgccactttaaaacagatagctagcaaattaagagaacaatttggaaataataaaacaataatctttaagcaatcctcaggaggggacccagaaattgtaacgcacagttttaattgtggaggggaatttttctactgtaattcaacacaactgtttaatagtacttggtttaatagtacttggagtactgaagggtcaaataacactgaaggaagtgacacaatcacactcccatgcagaataaaacaatttataaacatgtggcaggaagtaggaaaagcaatgtatgcccctcccatcagtggacaaattagatgttcatcaaatattactgggctgctattaacaagagatggtggtaataacaacaatgggtccgagatcttcagacctggaggaggcgatatgagggacaattggagaagtgaattatataaatataaagtagtaaaaattgaaccattaggagtagcacccaccaaggcaaagagaagagtggtgcagagagaaaaaagagcagtgggaataggagctttgttccttgggttcttgggagcagcaggaagcactatgggcgcagcgtcaatgacgctgacggtacaggccagacaattattgtctgatatagtgcagcagcagaacaatttgctgagggctattgaggcgcaacagcatctgttgcaactcacagtctggggcatcaaacagctccaggcaagaatcctggctgtggaaagatacctaaaggatcaacagctcctggggatttggggttgctctggaaaactcatttgcaccactgctgtgccttggaatgctagttggagtaataaatctctggaacagatttggaataacatgacctggatggagtgggacagagaaattaacaattacacaagcttaatacactccttaattgaagaatcgcaaaaccagcaagaaaagaatgaacaagaattattggaattagataaatgggcaagtttgtggaattggtttaacataacaaattggctgtggtatataaaattattcataatgatagtaggaggcttggtaggtttaagaatagtttttgctgtactttctatagtgaatagagttaggcagggatattcaccattatcgtttcagacccacctcccaatcccgaggggacccgacaggcccgaaggaatagaagaagaaggtggagagagagacagagacagatccattcgattagtgaacggatccttagcacttatctgggacgatctgcggagcctgtgcctcttcagctaccaccgcttgagagacttactcttgattgtaacgaggattgtggaacttctgggacgcagggggtgggaagccctcaaatattggtggaatctcctacagtattggagtcaggaactaaagaatagtgctgttaacttgctcaatgccacagccatagcagtagctgaggggacagatagggttatagaagtattacaagcagcttatagagctattcgccacatacctagaagaataagacagggcttggaaaggattttgctataagatgggtggcaagtggtcaaaaagtagtgtgattggatggcctgctgtaagggaaagaatgagacgagctgagccagcagcagatggggtgggagcagtatctcgagacctagaaaaacatggagcaatcacaagtagcaatacagcagctaacaatgctgcttgtgcctggctagaagcacaagaggaggaagaggtgggttttccagtcacacctcaggtacctttaagaccaatgacttacaaggcagctgtagatcttagccactttttaaaagaaaaggggggactggaagggctaattcactcccaaagaagacaagatatccttgatctgtggatctaccacacacaaggctacttccctgattggcagaactacacaccagggccaggggtcagatatccactgacctttggatggtgctacaagctagtaccagttgagccagataaggtagaagaggccaataaaggagagaacaccagcttgttacaccctgtgagcctgcatggaatggatgaccctgagagagaagtgttagagtggaggtttgacagccgcctagcatttcatcacgtggcccgagagctgcatccggagtacttcaagaactgctgacatcgagcttgctacaagggactttccgctggggactttccagggaggcgtggcctgggcgggactggggagtggcgagccctcagatgctgcatataagcagctgctttttgcctgtactgggtctctctggttagaccagatctgagcctgggagctctctggctaactagggaacccactgcttaagcctcaataaagcttgccttgagtgcttcaagtagtgtgtgcccgtctgttgtgtgactctggtaactagagatccctcagacccttttagtcagtgtggaaaatctctagca

SEQ ID NO: 99 - DNA, 6792 bp, Artificial Sequence
  Synthetic Sequence
tggaagggctaatttggtcccaaaaaagacaagagatccttgatctgtggatctaccacacacaaggctacttccctgattggcagaactacacaccagggccagggatcagatatccactgacctttggatggtgcttcaagttagtaccagttgaaccagagcaagtagaagaggccaatgaaggagagaacaacagcttgttacaccctatgagccagcatgggatggaggacccggagggagaagtattagtgtggaagtttgacagcctcctagcatttcgtcacatggcccgagagctgcatccggagtactacaaagactgctgacatcgagctttctacaagggactttccgctggggactttccagggaggtgtggcctgggcgggactggggagtggcgagccctcagatgctacatataagcagctgctttttgcctgtactgggtctctctggttagaccagatctgagcctgggagctctctggctaactagggaacccactgcttaagcctcaataaagcttgccttgagtgctcaaagtagtgtgtgcccgtctgttgtgtgactctggtaactagagatccctcagacccttttagtcagtgtggaaaatctctagcagtggcgcccgaacagggacttgaaagcgaaagtaaagccagaggagatctctcgacgcaggactcggcttgctgaagcgcgcacggcaagaggcgaggggcggcgactggtgagtacgccaaaaattttgactagcggaggctagaaggagagagatgggtgcgagagcgtcggtattaagcgggggagaattagataaatgggaaaaaattcggttaaggccagggggaaagaaacaatataaactaaaacatatagtatgggcaagcagggagctagaacgattcgcagttaatcctggccttttagagacatcagaaggctgtagacaaatactgggacagctacaaccatcccttcagacaggatcagaagaacttagatcattatataatacaatagcagtcctctattgtgtgcatcaaaggatagatgtaaaagacaccaaggaagccttagataagatagaggaagagcaaaacaaaagtaagaaaaaggcacagcaagcagcagctgacacaggaaacaacagccaggtcagccaaaattaccctatagtgcagaacctccaggggcaaatggtacatcaggccatatcacctagaactttaaatgcatgggtaaaagtagtagaagagaaggctttcagcccagaagtaatacccatgttttcagcattatcagaaggagccaccccacaagatttaaataccatgctaaacacagtggggggacatcaagcagccatgcaaatgttaaaagagaccatcaatgaggaagctgcagaatgggatagattgcatccagtgcatgcagggcctattgcaccaggccaaacgaatctgccgttgccatatgcagacattacactgtcgaatcgaacccttcatggacggtggaaaccaaaaatgatagggggaattggaggttttatcaaagtaagacagtatgatcagatactcatagaaatctgcggacataaagctataggtacagtattagtaggacctacacctgtcaacataattggaagaaatctgttgactcagattggctgcactttaaattttcccattagtcctattgagactgtaccagtaaaattaaagccaggaatggatggcccaaaagttaaacaatggccattgacagaagaaaaaataaaagcattagtagaaatttgtacagaaatggaaaaggaaggaaaaatttcaaaaattgggcctgaaaatccatacaatactccagtatttgccataaagaaaaaagacagtactaaatggagaaaattagtagatttcagagaacttaataagagaactcaagatttctgggaagttcaattaggaataccacatcctgcagggttaaaacagaaaaaatcagtaacagtactggatgtgggcgatgcatatttttcagttcccttagataaagacttcaggaagtatactgcatttaccatacctagtataaacaatgagacaccagggattagatatcagtacaatgtgcttccacagggatggaaaggatcaccagcaatattccagtgtagcatgacaaaaatcttagagccttttagaaaacaaaatccagacatagtcatctatcaatacatggatgatttgtatgtaggatctgacttagaaatagggcagcatagaacaaaaatagaggaactgagacaacatctgttgaggtggggatttaccacaccagacaaaaaacatcagaaagaacctccattcctttggatgggttatgaactccatcctgataaatggacagtacagcctatagtgctgccagaaaaggacagctggactgtcaatgacatacagaaattagtgggaaaattgaattgggcaagtcagatttatgcagggattaaagtaaggcaattatgtaaacttcttaggggaaccaaagcactaacagaagtagtaccactaacagaagaagcagagctagaactggcagaaaacagggagattctaaaagaaccggtacatggagtgtattatgacccatcaaaagacttaatagcagaaatacagaagcaggggcaaggccaatggacatatcaaatttatcaagagccatttaaaaatctgaaaacaggaaagtatgcaagaatgaacgaatctgccgttgccatatacagcatctgaacaagctgatcgaacccttcatggacggttaaggccgcctgttggtgggcggggatcaagcaggaatttggcattccctacaatccccaaagtcaaggagtaatagaatctatgaataaagaattaaagaaaattataggacaggtaagagatcaggctgaacatcttaagacagcagtacaaatggcagtattcatccacaattttaaaagaaaaggggggattggggggtacagtgcaggggaaagaatagtagacataatagcaacagacatacaaactaaagaattacaaaaacaaattacaaaaattcaaaattttcgggtttattacagggacagcagagatccagtttggaaaggaccagcaaagctcctctggaaaggtgaaggggcagtagtaatacaagataatagtgacataaaagtagtgccaagaagaaaagcaaagatcatcagggattaaccgtccatgaagggttcgattatctgtagccaacattcgatatggcaacggcagattcgttggagatgggggtggaaatggggcaccatgctccttgggatattgatgatctgtagtgctacagaaaaattgtgggtcacagtctattatggggtacctgtgtggaaggaagcaaccaccactctattttgtgcatcagatgctaaagcatatgatacagaggtacataatgtttgggccacacatgcctgtgtacccacagaccccaacccacaagaagtagtattggtaaatgtgacagaaaattttaacatgtggaaaaatgacatggtagaacagatgcatgaggatataatcagtttatgggatcaaagcctaaagccatgtgtaaaattaaccccactctgtgttagtttaaagtgcactgatttgaagaatgatactaataccaatagtagtagcgggagaatgataatggagaaaggagagataaaaaactgctctttcaatatcagcacaagcataagagataaggtgcagaaagaatatgcattcttttataaacttgatatagtaccaatagataataccagctataggttgataagttgtaacacctcagtcattacacaggcctgtccaaaggtatcctttgagccaattcccatacattattgtgccccggctggttttgcgattctaaaatgtaataataagacgttcaatggaacaggaccatgtacaaatgtcagcacagtacaatgtacacatggaatcaggccagtagtatcaactcaactgctgttaaatggcagtctagcagaagaagatgtagtaattagatctgccaatttcacagacaatgctaaaaccataatagtacagctgaacacatctgtagaaattaattgtacaagacccaacaacaatacaagaaaaagtatccgtatccagaggggaccagggagagcatttgttacaataggaaaaataggaaatatgagacaagcacattgtaacattagtagagcaaaatggaatgccactttaaaacagatagctagcaaattaagagaacaatttggaaataataaaacaataatctttaagcaatcctcaggaggggacccagaaattgtaacgcacagttttaattgtggaggggaatttttctactgtaattcaacacaactgtttaatagtacttggtttaatagtacttggagtactgaagggtcaaataacactgaaggaagtgacacaatcacactcccatgcagaataaaacaatttataaacatgtggcaggaagtaggaaaagcaatgtatgcccctcccatcagtggacaaattagatgttcatcaaatattactgggctgctattaacaagagatggtggtaataacaacaatgggtccgagatcttcagacctggaggaggcgatatgagggacaattggagaagtgaattatataaatataaagtagtaaaaattgaaccattaggagtagcacccaccaaggcaaagagaagagtggtgcagagagaaaaaagagcagtgggaataggagctttgttccttgggttcttgggagcagcaggaagcactatgggcgcagcgtcaatgacgctgacggtacaggccagacaattattgtctgatatagtgcagcagcagaacaatttgctgagggctattgaggcgcaacagcatctgttgcaactcacagtctggggcatcaaacagctccaggcaagaatcctggctgtggaaagatacctaaaggatcaacagctcctggggatttggggttgctctggaaaactcatttgcaccactgctgtgccttggaatgctagttggagtaataaatctctggaacagatttggaataacatgacctggatggagtgggacagagaaattaacaattacacaagcttaatacactccttaattgaagaatcgcaaaaccagcaagaaaagaatgaacaagaattattggaattagataaatgggcaagtttgtggaattggtttaacataacaaattggctgtggtatataaaattattcataatgatagtaggaggcttggtaggtttaagaatagtttttgctgtactttctatagtgaatagagttaggcagggatattcaccattatcgtttcagacccacctcccaatcccgaggggacccgacaggcccgaaggaatagaagaagaaggtggagagagagacagagacagatccattcgattagtgaacggatccttagcacttatctgggacgatctgcggagcctgtgcctcttcagctaccaccgcttgagagacttactcttgattgtaacgaggattgtggaacttctgggacgcagggggtgggaagccctcaaatattggtggaatctcctacagtattggagtcaggaactaaagaatagtgctgttaacttgctcaatgccacagccatagcagtagctgaggggacagatagggttatagaagtattacaagcagcttatagagctattcgccacatacctagaagaataagacagggcttggaaaggattttgctataagatgggtggcaagtggtcaaaaagtagtgtgattggatggcctgctgtaagggaaagaatgagacgagctgagccagcagcagatggggtgggagcagtatctcgagacctagaaaaacatggagcaatcacaagtagcaatacagcagctaacaatgctgcttgtgcctggctagaagcacaagaggaggaagaggtgggttttccagtcacacctcaggtacctttaagaccaatgacttacaaggcagctgtagatcttagccactttttaaaagaaaaggggggactggaagggctaattcactcccaaagaagacaagatatccttgatctgtggatctaccacacacaaggctacttccctgattggcagaactacacaccagggccaggggtcagatatccactgacctttggatggtgctacaagctagtaccagttgagccagataaggtagaagaggccaataaaggagagaacaccagcttgttacaccctgtgagcctgcatggaatggatgaccctgagagagaagtgttagagtggaggtttgacagccgcctagcatttcatcacgtggcccgagagctgcatccggagtacttcaagaactgctgacatcgagcttgctacaagggactttccgctggggactttccagggaggcgtggcctgggcgggactggggagtggcgagccctcagatgctgcatataagcagctgctttttgcctgtactgggtctctctggttagaccagatctgagcctgggagctctctggctaactagggaacccactgcttaagcctcaataaagcttgccttgagtgcttcaagtagtgtgtgcccgtctgttgtgtgactctggtaactagagatccctcagacccttttagtcagtgtggaaaatctctagca

SEQ ID NO: 100 - DNA, 8947 bp, Artificial Sequence
  Synthetic Sequence
tggaagggctaatttggtcccaaaaaagacaagagatccttgatctgtggatctaccacacacaaggctacttccctgattggcagaactacacaccagggccagggatcagatatccactgacctttggatggtgcttcaagttagtaccagttgaaccagagcaagtagaagaggccaatgaaggagagaacaacagcttgttacaccctatgagccagcatgggatggaggacccggagggagaagtattagtgtggaagtttgacagcctcctagcatttcgtcacatggcccgagagctgcatccggagtactacaaagactgctgacatcgagctttctacaagggactttccgctggggactttccagggaggtgtggcctgggcgggactggggagtggcgagccctcagatgctacatataagcagctgctttttgcctgtactgggtctctctggttagaccagatctgagcctgggagctctctggctaactagggaacccactgcttaagcctcaataaagcttgccttgagtgctcaaagtagtgtgtgcccgtctgttgtgtgactctggtaactagagatccctcagacccttttagtcagtgtggaaaatctctagcagtggcgcccgaacagggacttgaaagcgaaagtaaagccagaggagatctctcgacgcaggactcggcttgctgaagcgcgcacggcaagaggcgaggggcggcgactggtgagtacgccaaaaattttgactagcggaggctagaaggagagagatgggtgcgagagcgtcggtattaagcgggggagaattagataaatgggaaaaaattcggttaaggccagggggaaagaaacaatataaactaaaacatatagtatgggcaagcagggagctagaacgattcgcagttaatcctggccttttagagacatcagaaggctgtagacaaatactgggacagctacaaccatcccttcagacaggatcagaagaacttagatcattatataatacaatagcagtcctctattgtgtgcatcaaaggatagatgtaaaagacaccaaggaagccttagataagatagaggaagagcaaaacaaaagtaagaaaaaggcacagcaagcagcagctgacacaggaaacaacagccaggtcagccaaaattaccctatagtgcagaacctccaggggcaaatggtacatcaggccatatcacctagaactttaaatgcatgggtaaaagtagtagaagagaaggctttcagcccagaagtaatacccatgttttcagcattatcagaaggagccaccccacaagatttaaataccatgctaaacacagtggggggacatcaagcagccatgcaaatgttaaaagagaccatcaatgaggaagctgcagaatgggatagattgcatccagtgcatgcagggcctattgcaccaggccagatgagagaaccaagaccgtccatgaagggttcgatggggggcggcgattacttgttatggcaacggcagattcgttaaaggaagctctattagatacaggagcagatgatacagtattagaagaaatgaatttgccaggaagatggaaaccaaaaatgatagggggaattggaggttttatcaaagtaagacagtatgatcagatactcatagaaatctgcggacataaagctataggtacagtattagtaggacctacacctgtcaacataattggaagaaatctgttgactcagattggctgcactttaaattttcccattagtcctattgagactgtaccagtaaaattaaagccaggaatggatggcccaaaagttaaacaatggccattgacagaagaaaaaataaaagcattagtagaaatttgtacagaaatggaaaaggaaggaaaaatttcaaaaattgggcctgaaaatccatacaatactccagtatttgccataaagaaaaaagacagtactaaatggagaaaattagtagatttcagagaacttaataagagaactcaagatttctgggaagttcaattaggaataccacatcctgcagggttaaaacagaaaaaatcagtaacagtactggatgtgggcgatgcatatttttcagttcccttagataaagacttcaggaagtatactgcatttaccatacctagtataaacaatgagacaccagggattagatatcagtacaatgtgcttccacagggatggaaaggatcaccagcaatattccagtgtagcatgacaaaaatcttagagccttttagaaaacaaaatccagacatagtcatctatcaatacatggatgatttgtatgtaggatctgacttagaaatagggcagcatagaacaaaaatagaggaactgagacaacatctgttgaggtggggatttaccacaccagacaaaaaacatcagaaagaacctccattcctttggatgggttatgaactccatcctgataaatggacagtacagcctatagtgctgccagaaaaggacagctggactgtcaatgacatacagaaattagtgggaaaattgaattgggcaagtcagatttatgcagggattaaagtaaggcaattatgtaaacttcttaggggaaccaaagcactaacagaagtagtaccactaacagaagaagcagagctagaactggcagaaaacagggagattctaaaagaaccggtacatggagtgtattatgacccatcaaaagacttaatagcagaaatacagaagcaggggcaaggccaatggacatatcaaatttatcaagagccatttaaaaatctgaaaacaggaaagtatgcaagaatgaagggtgcccacactaatgatgtgaaacaattaacagaggcagtacaaaaaatagccacagaaagcatagtaatatggggaaagactcctaaatttaaattacccatacaaaaggaaacatgggaagcatggtggacagagtattggcaagccacctggattcctgagtgggagtttgtcaatacccctcccttagtgaagttatggtaccagttagagaaagaacccataataggagcagaaactttctatgtagatggggcagccaatagggaaactaaattaggaaaagcaggatatgtaactgacagaggaagacaaaaagttgtccccctaacggacacaacaaatcagaagactgagttacaagcaattcatctagctttgcaggattcgggattagaagtaaacatagtgacagactcacaatatgcattgggaatcattcaagcacaaccagataagagtgaatcagagttagtcagtcaaataatagagcagttaataaaaaaggaaaaagtctacctggcatgggtaccagcacacaaaggaattggaggaaatgaacaagtagataaattggtcagtgctggaatcaggaaagtactatttttagatggaatagataaggcccaagaagaacatgagaaatatcacagtaattggagagcaatggctagtgattttaacctaccacctgtagtagcaaaagaaatagtagccagctgtgataaatgtcagctaaaaggggaagccatgcatggacaagtagactgtagcccaggaatatggcagctagattgtacacatttagaaggaaaagttatcttggtagcagttcatgtagccagtggatatatagaagcagaagtaattccagcagagacagggcaagaaacagcatacttcctcttaaaattagcaggaagatggccagtaaaaacagtacatacagacaatggcagcaatttcaccagtactacagttaaggccgcctgttggtgggcggggatcaagcaggaatttggcattccctacaatccccaaagtcaaggagtaatagaatctatgaataaagaattaaagaaaattataggacaggtaagagatcaggctgaacatcttaagacagcagtacaaatggcagtattcatccacaattttaaaagaaaaggggggattggggggtacagtgcaggggaaagaatagtagacataatagcaacagacatacaaactaaagaattacaaaaacaaattacaaaaattcaaaattttcgggtttattacagggacagcagagatccagtttggaaaggaccagcaaagctcctctggaaaggtgaaggggcagtagtaatacaagataatagtgacataaaagtagtgccaagaagaaaagcaaagatcatcagggattatggaaaacagatggcaggtgatgattgtgtggcaagtagacaggatgaggattaacacatggaaaagattagtaaaacaccatatgtatatttcaaggaaagctaaggactggttttatagacatcactatgaaagtactaatccaaaaataagttcagaagtacacatcccactaggggatgctaaattagtaataacaacatattggggtctgcatacaggagaaagagactggcatttgggtcagggagtctccatagaatggaggaaaaagagatatagcacacaagtagaccctgacctagcagaccaactaattcatctgcactattttgattgtttttcagaatctgctataagaaataccatattaggacgtatagttagtcctaggtgtgaatatcaagcaggacataacaaggtaggatctctacagtacttggcactagcagcattaataaaaccaaaacagataaagccacctttgcctagtgttaggaaactgacagaggacagatggaacaagccccagaagaccaagggccacagagggagccatacaatgaatggacactagagcttttagaggaacttaagagtgaagctgttagacattttcctaggatatggctccataacttaggacaacatatctatgaaacttacggggatacttgggcaggagtggaagccataataagaattctgcaacaactgctgtttatccatttcagaattgggtgtcgacatagcagaataggcgttactcgacagaggagagcaagaaatggagccagtagatcctagactagagccctggaagcatccaggaagtcagcctaaaactgcttgtaccaattgctattgtaaaaagtgttgctttcattgccaagtttgtttcatgacaaaagccttaggcatctcctatggcaggaagaagcggagacagcgacgaagagctcatcagaacagtcagactcatcaagcttctctatcaaagcagtaagtagtacatgtaatgcaacctataatagtagcaatagtagcattagtagtagcaataataatagcaatagttgtgtggtccatagtaatcatagaatataggaaaatattaagacaaagaaaaatagacaggttaattgatagactaatagaaagagcagaagacagtggcaatgagagtgaaggagaagtatcagcacttgtggagatgggggtggaaatggggcaccatgctccttgggatattgatgatctgtagtgctacagaaaaattgtgggtcacagtctattatggggtacctgtgtggaaggaagcaaccaccactctattttgtgcatcagatgctaaagcatatgatacagaggtacataatgtttgggccacacatgcctgtgtacccacagaccccaacccacaagaagtagtattggtaaatgtgacagaaaattttaacatgtggaaaaatgacatggtagaacagatgcatgaggatataatcagtttatgggatcaaagcctaaagccatgtgtaaaattaaccccactctgtgttagtttaaagtgcactgatttgaagaatgatactaataccaatagtagtagcgggagaatgataatggagaaaggagagataaaaaactgctctttcaatatcagcacaagcataagagataaggtgcagaaagaatatgcattcttttataaacttgatatagtaccaatagataataccagctataggttgataagttgtaacacctcagtcattacacaggcctgtccaaaggtatcctttgagccaattcccatacattattgtgccccggctggttttgcgattctaaaatgtaataataagacgttcaatggaacaggaccatgtacaaatgtcagcacagtacaatgtacacatggaatcaggccagtagtatcaactcaactgctgttaaatggcagtctagcagaagaagatgtagtaattagatctgccaatttcacagacaatgctaaaaccataatagtacagctgaacacatctgtagaaattaattgtacaagacccaacaacaatacaagaaaaagtatccgtatccagaggggaccagggagagcatttgttacaataggaaaaataggaaatatgagacaagcacattgtaacattagtagagcaaaatggaatgccactttaaaacagatagctagcaaattaagagaacaatttggaaataataaaacaataatctttaagcaatcctcaggaggggacccagaaattgtaacgcacagttttaattgtggaggggaatttttctactgtaattcaacacaactgtttaatagtacttggtttaatagtacttggagtactgaagggtcaaataacactgaaggaagtgacacaatcacactcccatgcagaataaaacaatttataaacatgtggcaggaagtaggaaaagcaatgtatgcccctcccatcagtggacaaattagatgttcatcaaatattactgggctgctattaacaagagatggtggtaataacaacaatgggtccgagatcttcagacctggaggaggcgatatgagggacaattggagaagtgaattatataaatataaagtagtaaaaattgaaccattaggagtagcacccaccaaggcaaagagaagagtggtgcagagagaaaaaagagcagtgggaataggagctttgttccttgggttcttgggagcagcaggaagcactatgggcgcagcgtcaatgacgctgacggtacaggccagacaattattgtctgatatagtgcagcagcagaacaatttgctgagggctattgaggcgcaacagcatctgttgcaactcacagtctggggcatcaaacagctccaggcaagaatcctggctgtggaaagatacctaaaggatcaacagctcctggggatttggggttgctctggaaaactcatttgcaccactgctgtgccttggaatgctagttggagtaataaatctctggaacagatttggaataacatgacctggatggagtgggacagagaaattaacaattacacaagcttaatacactccttaattgaagaatcgcaaaaccagcaagaaaagaatgaacaagaattattggaattagataaatgggcaagtttgtggaattggtttaacataacaaattggctgtggtatataaaattattcataatgatagtaggaggcttggtaggtttaagaatagtttttgctgtactttctatagtgaatagagttaggcagggatattcaccattatcgtttcagacccacctcccaatcccgaggggacccgacaggcccgaaggaatagaagaagaaggtggagagagagacagagacagatccattcgattagtgaacggatccttagcacttatctgggacgatctgcggagcctgtgcctcttcagctaccaccgcttgagagacttactcttgattgtaacgaggattgtggaacttctgggacgcagggggtgggaagccctcaaatattggtggaatctcctacagtattggagtcaggaactaaagaatagtgctgttaacttgctcaatgccacagccatagcagtagctgaggggacagatagggttatagaagtattacaagcagcttatagagctattcgccacatacctagaagaataagacagggcttggaaaggattttgctataagatgggtggcaagtggtcaaaaagtagtgtgattggatggcctgctgtaagggaaagaatgagacgagctgagccagcagcagatggggtgggagcagtatctcgagacctagaaaaacatggagcaatcacaagtagcaatacagcagctaacaatgctgcttgtgcctggctagaagcacaagaggaggaagaggtgggttttccagtcacacctcaggtacctttaagaccaatgacttacaaggcagctgtagatcttagccactttttaaaagaaaaggggggactggaagggctaattcactcccaaagaagacaagatatccttgatctgtggatctaccacacacaaggctacttccctgattggcagaactacacaccagggccaggggtcagatatccactgacctttggatggtgctacaagctagtaccagttgagccagataaggtagaagaggccaataaaggagagaacaccagcttgttacaccctgtgagcctgcatggaatggatgaccctgagagagaagtgttagagtggaggtttgacagccgcctagcatttcatcacgtggcccgagagctgcatccggagtacttcaagaactgctgacatcgagcttgctacaagggactttccgctggggactttccagggaggcgtggcctgggcgggactggggagtggcgagccctcagatgctgcatataagcagctgctttttgcctgtactgggtctctctggttagaccagatctgagcctgggagctctctggctaactagggaacccactgcttaagcctcaataaagcttgccttgagtgcttcaagtagtgtgtgcccgtctgttgtgtgactctggtaactagagatccctcagacccttttagtcagtgtggaaaatctctagca

SEQ ID NO: 101 - DNA, 8024 bp, Artificial Sequence
  Synthetic Sequence
tggaagggctaatttggtcccaaaaaagacaagagatccttgatctgtggatctaccacacacaaggctacttccctgattggcagaactacacaccagggccagggatcagatatccactgacctttggatggtgcttcaagttagtaccagttgaaccagagcaagtagaagaggccaatgaaggagagaacaacagcttgttacaccctatgagccagcatgggatggaggacccggagggagaagtattagtgtggaagtttgacagcctcctagcatttcgtcacatggcccgagagctgcatccggagtactacaaagactgctgacatcgagctttctacaagggactttccgctggggactttccagggaggtgtggcctgggcgggactggggagtggcgagccctcagatgctacatataagcagctgctttttgcctgtactgggtctctctggttagaccagatctgagcctgggagctctctggctaactagggaacccactgcttaagcctcaataaagcttgccttgagtgctcaaagtagtgtgtgcccgtctgttgtgtgactctggtaactagagatccctcagacccttttagtcagtgtggaaaatctctagcagtggcgcccgaacagggacttgaaagcgaaagtaaagccagaggagatctctcgacgcaggactcggcttgctgaagcgcgcacggcaagaggcgaggggcggcgactggtgagtacgccaaaaattttgactagcggaggctagaaggagagagatgggtgcgagagcgtcggtattaagcgggggagaattagataaatgggaaaaaattcggttaaggccagggggaaagaaacaatataaactaaaacatatagtatgggcaagcagggagctagaacgattcgcagttaatcctggccttttagagacatcagaaggctgtagacaaatactgggacagctacaaccatcccttcagacaggatcagaagaacttagatcattatataatacaatagcagtcctctattgtgtgcatcaaaggatagatgtaaaagacaccaaggaagccttagataagatagaggaagagcaaaacaaaagtaagaaaaaggcacagcaagcagcagctgacacaggaaacaacagccaggtcagccaaaattaccctatagtgcagaacctccaggggcaaatggtacatcaggccatatcacctagaactttaaatgcatgggtaaaagtagtagaagagaaggctttcagcccagaagtaatacccatgttttcagcattatcagaaggagccaccccacaagatttaaataccatgctaaacacagtggggggacatcaagcagccatgcaaatgttaaaagagaccatcaatgaggaagctgcagaatgggatagattgcatccagtgcatgcagggcctattgcaccaggccagatgagagaaccaagaccgtccatgaagggttcgatggggggcggcgattacttgttatggcaacggcagattcgttaaaggaagctctattagatacaggagcagatgatacagtattagaagaaatgaatttgccaggaagatggaaaccaaaaatgatagggggaattggaggttttatcaaagtaagacagtatgatcagatactcatagaaatctgcggacataaagctataggtacagtattagtaggacctacacctgtcaacataattggaagaaatctgttgactcagattggctgcactttaaattttcccattagtcctattgagactgtaccagtaaaattaaagccaggaatggatggcccaaaagttaaacaatggccattgacagaagaaaaaataaaagcattagtagaaatttgtacagaaatggaaaaggaaggaaaaatttcaaaaattgggcctgaaaatccatacaatactccagtatttgccataaagaaaaaagacagtactaaatggagaaaattagtagatttcagagaacttaataagagaactcaagatttctgggaagttcaattaggaataccacatcctgcagggttaaaacagaaaaaatcagtaacagtactggatgtgggcgatgcatatttttcagttcccttagataaagacttcaggaagtatactgcatttaccatacctagtataaacaatgagacaccagggattagatatcagtacaatgtgcttccacagggatggaaaggatcaccagcaatattccagtgtagcatgacaaaaatcttagagccttttagaaaacaaaatccagacatagtcatctatcaatacatggatgatttgtatgtaggatctgacttagaaatagggcagcatagaacaaaaatagaggaactgagacaacatctgttgaggtggggatttaccacaccagacaaaaaacatcagaaagaacctccattcctttggatgggttatgaactccatcctgataaatggacagtacagcctatagtgctgccagaaaaggacagctggactgtcaatgacatacagaaattagtgggaaaattgaattgggcaagtcagatttatgcagggattaaagtaaggcaattatgtaaacttcttaggggaaccaaagcactaacagaagtagtaccactaacagaagaagcagagctagaactggcagaaaacagggagattctaaaagaaccggtacatggagtgtattatgacccatcaaaagacttaatagcagaaatacagaagcaggggcaaggccaatggacatatcaaatttatcaagagccatttaaaaatctgaaaacaggaaagtatgcaagaatgaagggtgcccacactaatgatgtgaaacaattaacagaggcagtacaaaaaatagccacagaaagcatagtaatatggggaaagactcctaaatttaaattacccatacaaaaggaaacatgggaagcatggtggacagagtattggcaagccacctggattcctgagtgggagtttgtcaatacccctcccttagtgaagttatggtaccagttagagaaagaacccataataggagcagaaactttctatgtagatggggcagccaatagggaaactaaattaggaaaagcaggatatgtaactgacagaggaagacaaaaagttgtccccctaacggacacaacaaatcagaagactgagttacaagcaattcatctagctttgcaggattcgggattagaagtaaacatagtgacagactcacaatatgcattgggaatcattcaagcacaaccagataagagtgaatcagagttagtcagtcaaataatagagcagttaataaaaaaggaaaaagtctacctggcatgggtaccagcacacaaaggaattggaggaaatgaacaagtagataaattggtcagtgctggaatcaggaaagtactatttttagatggaatagataaggcccaagaagaacatgagaaatatcacagtaattggagagcaatggctagtgattttaacctaccacctgtagtagcaaaagaaatagtagccagctgtgataaatgtcagctaaaaggggaagccatgcatggacaagtagactgtagcccaggaatatggcagctagattgtacacatttagaaggaaaagttatcttggtagcagttcatgtagccagtggatatatagaagcagaagtaattccagcagagacagggcaagaaacagcatacttcctcttaaaattagcaggaagatggccagtaaaaacagtacatacagacaatggcagcaatttcaccagtactacagttaaggccgcctgttggtgggcggggatcaagcaggaatttggcattccctacaatccccaaagtcaaggagtaatagaatctatgaataaagaattaaagaaaattataggacaggtaagagatcaggctgaacatcttaagacagcagtacaaatggcagtattcatccacaattttaaaagaaaaggggggattggggggtacagtgcaggggaaagaatagtagacataatagcaacagacatacaaactaaagaattacaaaaacaaattacaaaaattcaaaattttcgggtttattacagggacagcagagatccagtttggaaaggaccagcaaagctcctctggaaaggtgaaggggcagtagtaatacaagataatagtgacataaaagtagtgccaagaagaaaagcaaagatcatcagggattatggaaaacagatggcaggtgatgattgtgtggcccgtccatgaagggttcgattcttgaacagcgcggtctgttatggcaacggcagattcgtttaatgcaacctataatagtagcaatagtagcattagtagtagcaataataatagcaatagttgtgtggtccatagtaatcatagaatataggaaaatattaagacaaagaaaaatagacaggttaattgatagactaatagaaagagcagaagacagtggcaatgagagtgaaggagaagtatcagcacttgtggagatgggggtggaaatggggcaccatgctccttgggatattgatgatctgtagtgctacagaaaaattgtgggtcacagtctattatggggtacctgtgtggaaggaagcaaccaccactctattttgtgcatcagatgctaaagcatatgatacagaggtacataatgtttgggccacacatgcctgtgtacccacagaccccaacccacaagaagtagtattggtaaatgtgacagaaaattttaacatgtggaaaaatgacatggtagaacagatgcatgaggatataatcagtttatgggatcaaagcctaaagccatgtgtaaaattaaccccactctgtgttagtttaaagtgcactgatttgaagaatgatactaataccaatagtagtagcgggagaatgataatggagaaaggagagataaaaaactgctctttcaatatcagcacaagcataagagataaggtgcagaaagaatatgcattcttttataaacttgatatagtaccaatagataataccagctataggttgataagttgtaacacctcagtcattacacaggcctgtccaaaggtatcctttgagccaattcccatacattattgtgccccggctggttttgcgattctaaaatgtaataataagacgttcaatggaacaggaccatgtacaaatgtcagcacagtacaatgtacacatggaatcaggccagtagtatcaactcaactgctgttaaatggcagtctagcagaagaagatgtagtaattagatctgccaatttcacagacaatgctaaaaccataatagtacagctgaacacatctgtagaaattaattgtacaagacccaacaacaatacaagaaaaagtatccgtatccagaggggaccagggagagcatttgttacaataggaaaaataggaaatatgagacaagcacattgtaacattagtagagcaaaatggaatgccactttaaaacagatagctagcaaattaagagaacaatttggaaataataaaacaataatctttaagcaatcctcaggaggggacccagaaattgtaacgcacagttttaattgtggaggggaatttttctactgtaattcaacacaactgtttaatagtacttggtttaatagtacttggagtactgaagggtcaaataacactgaaggaagtgacacaatcacactcccatgcagaataaaacaatttataaacatgtggcaggaagtaggaaaagcaatgtatgcccctcccatcagtggacaaattagatgttcatcaaatattactgggctgctattaacaagagatggtggtaataacaacaatgggtccgagatcttcagacctggaggaggcgatatgagggacaattggagaagtgaattatataaatataaagtagtaaaaattgaaccattaggagtagcacccaccaaggcaaagagaagagtggtgcagagagaaaaaagagcagtgggaataggagctttgttccttgggttcttgggagcagcaggaagcactatgggcgcagcgtcaatgacgctgacggtacaggccagacaattattgtctgatatagtgcagcagcagaacaatttgctgagggctattgaggcgcaacagcatctgttgcaactcacagtctggggcatcaaacagctccaggcaagaatcctggctgtggaaagatacctaaaggatcaacagctcctggggatttggggttgctctggaaaactcatttgcaccactgctgtgccttggaatgctagttggagtaataaatctctggaacagatttggaataacatgacctggatggagtgggacagagaaattaacaattacacaagcttaatacactccttaattgaagaatcgcaaaaccagcaagaaaagaatgaacaagaattattggaattagataaatgggcaagtttgtggaattggtttaacataacaaattggctgtggtatataaaattattcataatgatagtaggaggcttggtaggtttaagaatagtttttgctgtactttctatagtgaatagagttaggcagggatattcaccattatcgtttcagacccacctcccaatcccgaggggacccgacaggcccgaaggaatagaagaagaaggtggagagagagacagagacagatccattcgattagtgaacggatccttagcacttatctgggacgatctgcggagcctgtgcctcttcagctaccaccgcttgagagacttactcttgattgtaacgaggattgtggaacttctgggacgcagggggtgggaagccctcaaatattggtggaatctcctacagtattggagtcaggaactaaagaatagtgctgttaacttgctcaatgccacagccatagcagtagctgaggggacagatagggttatagaagtattacaagcagcttatagagctattcgccacatacctagaagaataagacagggcttggaaaggattttgctataagatgggtggcaagtggtcaaaaagtagtgtgattggatggcctgctgtaagggaaagaatgagacgagctgagccagcagcagatggggtgggagcagtatctcgagacctagaaaaacatggagcaatcacaagtagcaatacagcagctaacaatgctgcttgtgcctggctagaagcacaagaggaggaagaggtgggttttccagtcacacctcaggtacctttaagaccaatgacttacaaggcagctgtagatcttagccactttttaaaagaaaaggggggactggaagggctaattcactcccaaagaagacaagatatccttgatctgtggatctaccacacacaaggctacttccctgattggcagaactacacaccagggccaggggtcagatatccactgacctttggatggtgctacaagctagtaccagttgagccagataaggtagaagaggccaataaaggagagaacaccagcttgttacaccctgtgagcctgcatggaatggatgaccctgagagagaagtgttagagtggaggtttgacagccgcctagcatttcatcacgtggcccgagagctgcatccggagtacttcaagaactgctgacatcgagcttgctacaagggactttccgctggggactttccagggaggcgtggcctgggcgggactggggagtggcgagccctcagatgctgcatataagcagctgctttttgcctgtactgggtctctctggttagaccagatctgagcctgggagctctctggctaactagggaacccactgcttaagcctcaataaagcttgccttgagtgcttcaagtagtgtgtgcccgtctgttgtgtgactctggtaactagagatccctcagacccttttagtcagtgtggaaaatctctagca

SEQ ID NO: 102 - DNA, 7799 bp, Artificial Sequence
  Synthetic Sequence
tggaagggctaatttggtcccaaaaaagacaagagatccttgatctgtggatctaccacacacaaggctacttccctgattggcagaactacacaccagggccagggatcagatatccactgacctttggatggtgcttcaagttagtaccagttgaaccagagcaagtagaagaggccaatgaaggagagaacaacagcttgttacaccctatgagccagcatgggatggaggacccggagggagaagtattagtgtggaagtttgacagcctcctagcatttcgtcacatggcccgagagctgcatccggagtactacaaagactgctgacatcgagctttctacaagggactttccgctggggactttccagggaggtgtggcctgggcgggactggggagtggcgagccctcagatgctacatataagcagctgctttttgcctgtactgggtctctctggttagaccagatctgagcctgggagctctctggctaactagggaacccactgcttaagcctcaataaagcttgccttgagtgctcaaagtagtgtgtgcccgtctgttgtgtgactctggtaactagagatccctcagacccttttagtcagtgtggaaaatctctagcagtggcgcccgaacagggacttgaaagcgaaagtaaagccagaggagatctctcgacgcaggactcggcttgctgaagcgcgcacggcaagaggcgaggggcggcgactggtgagtacgccaaaaattttgactagcggaggctagaaggagagagatgggtgcgagagcgtcggtattaagcgggggagaattagataaatgggaaaaaattcggttaaggccagggggaaagaaacaatataaactaaaacatatagtatgggcaagcagggagctagaacgattcgcagttaatcctggccttttagagacatcagaaggctgtagacaaatactgggacagctacaaccatcccttcagacaggatcagaagaacttagatcattatataatacaatagcagtcctctattgtgtgcatcaaaggatagatgtaaaagacaccaaggaagccttagataagatagaggaagagcaaaacaaaagtaagaaaaaggcacagcaagcagcagctgacacaggaaacaacagccaggtcagccaaaattaccctatagtgcagaacctccaggggcaaatggtacatcaggccatatcacctagaactttaaatgcatgggtaaaagtagtagaagagaaggctttcagcccagaagtaatacccatgttttcagcattatcagaaggagccaccccacaagatttaaataccatgctaaacacagtggggggacatcaagcagccatgcaaatgttaaaagagaccatcaatgaggaagctgcagaatgggatagattgcatccagtgcatgcagggcctattgcaccaggccagatgagagaaccaagaccgtccatgaagggttcgatggggggcggcgattacttgttatggcaacggcagattcgttaaaggaagctctattagatacaggagcagatgatacagtattagaagaaatgaatttgccaggaagatggaaaccaaaaatgatagggggaattggaggttttatcaaagtaagacagtatgatcagatactcatagaaatctgcggacataaagctataggtacagtattagtaggacctacacctgtcaacataattggaagaaatctgttgactcagattggctgcactttaaattttcccattagtcctattgagactgtaccagtaaaattaaagccaggaatggatggcccaaaagttaaacaatggccattgacagaagaaaaaataaaagcattagtagaaatttgtacagaaatggaaaaggaaggaaaaatttcaaaaattgggcctgaaaatccatacaatactccagtatttgccataaagaaaaaagacagtactaaatggagaaaattagtagatttcagagaacttaataagagaactcaagatttctgggaagttcaattaggaataccacatcctgcagggttaaaacagaaaaaatcagtaacagtactggatgtgggcgatgcatatttttcagttcccttagataaagacttcaggaagtatactgcatttaccatacctagtataaacaatgagacaccagggattagatatcagtacaatgtgcttccacagggatggaaaggatcaccagcaatattccagtgtagcatgacaaaaatcttagagccttttagaaaacaaaatccagacatagtcatctatcaatacatggatgatttgtatgtaggatctgacttagaaatagggcagcatagaacaaaaatagaggaactgagacaacatctgttgaggtggggatttaccacaccagacaaaaaacatcagaaagaacctccattcctttggatgggttatgaactccatcctgataaatggacagtacagcctatagtgctgccagaaaaggacagctggactgtcaatgacatacagaaattagtgggaaaattgaattgggcaagtcagatttatgcagggattaaagtaaggcaattatgtaaacttcttaggggaaccaaagcactaacagaagtagtaccactaacagaagaagcagagctagaactggcagaaaacagggagattctaaaagaaccggtacatggagtgtattatgacccatcaaaagacttaatagcagaaatacagaagcaggggcaaggccaatggacatatcaaatttatcaagagccatttaaaaatctgaaaacaggaaagtatgcaagaatgaagggtgcccacactaatgatgtgaaacaattaacagaggcagtacaaaaaatagccacagaaagcatagtaatatggggaaagactcctaaatttaaattacccatacaaaaggaaacatgggaagcatggtggacagagtattggcaagccacctggattcctgagtgggagtttgtcaatacccctcccttagtgaagttatggtaccagttagagaaagaacccataataggagcagaaactttctatgtagatggggcagccaatagggaaactaaattaggaaaagcaggatatgtaactgacagaggaagacaaaaagttgtccccctaacggacacaacaaatcagaagactgagttacaagcaattcatctagctttgcaggattcgggattagaagtaaacatagtgacagactcacaatatgcattgggaatcattcaagcacaaccagataagagtgaatcagagttagtcagtcaaataatagagcagttaataaaaaaggaaaaagtctacctggcatgggtaccagcacacaaaggaattggaggaaatgaacaagtagataaattggtcagtgctggaatcaggaaagtactatttttagatggaatagataaggcccaagaagaacatgagaaatatcacagtaattggagagcaatggctagtgattttaacctaccacctgtagtagcaaaagaaatagtagccagctgtgataaatgtcagctaaaaggggaagccatgcatggacaagtagactgtagcccaggaatatggcagctagattgtacacatttagaaggaaaagttatcttggtagcagttcatgtagccagtggatatatagaagcagaagtaattccagcagagacagggcaagaaacagcatacttcctcttaaaattagcaggaagatggccagtaaaaacagtacatacagacaatggcagcaatttcaccagtactacagttaaggccgcctgttggtgggcggggatcaagcaggaatttggcattccctacaatccccaaagtcaaggagtaatagaatctatgaataaagaattaaagaaaattataggacaggtaagagatcaggctgaacatcttaagacagcagtacaaatggcagtattcatccacaattttaaaagaaaaggggggattggggggtacagtgcaggggaaagaatagtagacataatagcaacagacatacaaactaaagaattacaaaaacaaattacaaaaattcaaaattttcgggtttattacagggacagcagagatccagtttggaaaggaccagcaaagctcctctggaaaggtgaaggggcagtagtaatacaagataatagtgacataaaagtagtgccaagaagaaaagcaaagatcatcagggattaaccgtccatgaagggttcgattatctgtagccaacattcgatatggcaacggcagattcgttggagatgggggtggaaatggggcaccatgctccttgggatattgatgatctgtagtgctacagaaaaattgtgggtcacagtctattatggggtacctgtgtggaaggaagcaaccaccactctattttgtgcatcagatgctaaagcatatgatacagaggtacataatgtttgggccacacatgcctgtgtacccacagaccccaacccacaagaagtagtattggtaaatgtgacagaaaattttaacatgtggaaaaatgacatggtagaacagatgcatgaggatataatcagtttatgggatcaaagcctaaagccatgtgtaaaattaaccccactctgtgttagtttaaagtgcactgatttgaagaatgatactaataccaatagtagtagcgggagaatgataatggagaaaggagagataaaaaactgctctttcaatatcagcacaagcataagagataaggtgcagaaagaatatgcattcttttataaacttgatatagtaccaatagataataccagctataggttgataagttgtaacacctcagtcattacacaggcctgtccaaaggtatcctttgagccaattcccatacattattgtgccccggctggttttgcgattctaaaatgtaataataagacgttcaatggaacaggaccatgtacaaatgtcagcacagtacaatgtacacatggaatcaggccagtagtatcaactcaactgctgttaaatggcagtctagcagaagaagatgtagtaattagatctgccaatttcacagacaatgctaaaaccataatagtacagctgaacacatctgtagaaattaattgtacaagacccaacaacaatacaagaaaaagtatccgtatccagaggggaccagggagagcatttgttacaataggaaaaataggaaatatgagacaagcacattgtaacattagtagagcaaaatggaatgccactttaaaacagatagctagcaaattaagagaacaatttggaaataataaaacaataatctttaagcaatcctcaggaggggacccagaaattgtaacgcacagttttaattgtggaggggaatttttctactgtaattcaacacaactgtttaatagtacttggtttaatagtacttggagtactgaagggtcaaataacactgaaggaagtgacacaatcacactcccatgcagaataaaacaatttataaacatgtggcaggaagtaggaaaagcaatgtatgcccctcccatcagtggacaaattagatgttcatcaaatattactgggctgctattaacaagagatggtggtaataacaacaatgggtccgagatcttcagacctggaggaggcgatatgagggacaattggagaagtgaattatataaatataaagtagtaaaaattgaaccattaggagtagcacccaccaaggcaaagagaagagtggtgcagagagaaaaaagagcagtgggaataggagctttgttccttgggttcttgggagcagcaggaagcactatgggcgcagcgtcaatgacgctgacggtacaggccagacaattattgtctgatatagtgcagcagcagaacaatttgctgagggctattgaggcgcaacagcatctgttgcaactcacagtctggggcatcaaacagctccaggcaagaatcctggctgtggaaagatacctaaaggatcaacagctcctggggatttggggttgctctggaaaactcatttgcaccactgctgtgccttggaatgctagttggagtaataaatctctggaacagatttggaataacatgacctggatggagtgggacagagaaattaacaattacacaagcttaatacactccttaattgaagaatcgcaaaaccagcaagaaaagaatgaacaagaattattggaattagataaatgggcaagtttgtggaattggtttaacataacaaattggctgtggtatataaaattattcataatgatagtaggaggcttggtaggtttaagaatagtttttgctgtactttctatagtgaatagagttaggcagggatattcaccattatcgtttcagacccacctcccaatcccgaggggacccgacaggcccgaaggaatagaagaagaaggtggagagagagacagagacagatccattcgattagtgaacggatccttagcacttatctgggacgatctgcggagcctgtgcctcttcagctaccaccgcttgagagacttactcttgattgtaacgaggattgtggaacttctgggacgcagggggtgggaagccctcaaatattggtggaatctcctacagtattggagtcaggaactaaagaatagtgctgttaacttgctcaatgccacagccatagcagtagctgaggggacagatagggttatagaagtattacaagcagcttatagagctattcgccacatacctagaagaataagacagggcttggaaaggattttgctataagatgggtggcaagtggtcaaaaagtagtgtgattggatggcctgctgtaagggaaagaatgagacgagctgagccagcagcagatggggtgggagcagtatctcgagacctagaaaaacatggagcaatcacaagtagcaatacagcagctaacaatgctgcttgtgcctggctagaagcacaagaggaggaagaggtgggttttccagtcacacctcaggtacctttaagaccaatgacttacaaggcagctgtagatcttagccactttttaaaagaaaaggggggactggaagggctaattcactcccaaagaagacaagatatccttgatctgtggatctaccacacacaaggctacttccctgattggcagaactacacaccagggccaggggtcagatatccactgacctttggatggtgctacaagctagtaccagttgagccagataaggtagaagaggccaataaaggagagaacaccagcttgttacaccctgtgagcctgcatggaatggatgaccctgagagagaagtgttagagtggaggtttgacagccgcctagcatttcatcacgtggcccgagagctgcatccggagtacttcaagaactgctgacatcgagcttgctacaagggactttccgctggggactttccagggaggcgtggcctgggcgggactggggagtggcgagccctcagatgctgcatataagcagctgctttttgcctgtactgggtctctctggttagaccagatctgagcctgggagctctctggctaactagggaacccactgcttaagcctcaataaagcttgccttgagtgcttcaagtagtgtgtgcccgtctgttgtgtgactctggtaactagagatccctcagacccttttagtcagtgtggaaaatctctagca

SEQ ID NO: 103 - DNA, 8023 bp, Artificial Sequence
  Synthetic Sequence
tggaagggctaatttggtcccaaaaaagacaagagatccttgatctgtggatctaccacacacaaggctacttccctgattggcagaactacacaccagggccagggatcagatatccactgacctttggatggtgcttcaagttagtaccagttgaaccagagcaagtagaagaggccaatgaaggagagaacaacagcttgttacaccctatgagccagcatgggatggaggacccggagggagaagtattagtgtggaagtttgacagcctcctagcatttcgtcacatggcccgagagctgcatccggagtactacaaagactgctgacatcgagctttctacaagggactttccgctggggactttccagggaggtgtggcctgggcgggactggggagtggcgagccctcagatgctacatataagcagctgctttttgcctgtactgggtctctctggttagaccagatctgagcctgggagctctctggctaactagggaacccactgcttaagcctcaataaagcttgccttgagtgctcaaagtagtgtgtgcccgtctgttgtgtgactctggtaactagagatccctcagacccttttagtcagtgtggaaaatctctagcagtggcgcccgaacagggacttgaaagcgaaagtaaagccagaggagatctctcgacgcaggactcggcttgctgaagcgcgcacggcaagaggcgaggggcggcgactggtgagtacgccaaaaattttgactagcggaggctagaaggagagagatgggtgcgagagcgtcggtattaagcgggggagaattagataaatgggaaaaaattcggttaaggccagggggaaagaaacaatataaactaaaacatatagtatgggcaagcagggagctagaacgattcgcagttaatcctggccttttagagacatcagaaggctgtagacaaatactgggacagctacaaccatcccttcagacaggatcagaagaacttagatcattatataatacaatagcagtcctctattgtgtgcatcaaaggatagatgtaaaagacaccaaggaagccttagataagatagaggaagagcaaaacaaaagtaagaaaaaggcacagcaagcagcagctgacacaggaaacaacagccaggtcagccaaaattaccctatagtgcagaacctccaggggcaaatggtacatcaggccatatcacctagaactttaaatgcatgggtaaaagtagtagaagagaaggctttcagcccagaagtaatacccatgttttcagcattatcagaaggagccaccccacaagatttaaataccatgctaaacacagtggggggacatcaagcagccatgcaaatgttaaaagagaccatcaatgaggaagctgcagaatgggatagattgcatccagtgcatgcagggcctattgcaccaggccagatgagagaaccaagaccgtccatgaagggttcgatggggggcggcgattacttgttatggcaacggcagattcgttaaaggaagctctattagatacaggagcagatgatacagtattagaagaaatgaatttgccaggaagatggaaaccaaaaatgatagggggaattggaggttttatcaaagtaagacagtatgatcagatactcatagaaatctgcggacataaagctataggtacagtattagtaggacctacacctgtcaacataattggaagaaatctgttgactcagattggctgcactttaaattttcccattagtcctattgagactgtaccagtaaaattaaagccaggaatggatggcccaaaagttaaacaatggccattgacagaagaaaaaataaaagcattagtagaaatttgtacagaaatggaaaaggaaggaaaaatttcaaaaattgggcctgaaaatccatacaatactccagtatttgccataaagaaaaaagacagtactaaatggagaaaattagtagatttcagagaacttaataagagaactcaagatttctgggaagttcaattaggaataccacatcctgcagggttaaaacagaaaaaatcagtaacagtactggatgtgggcgatgcatatttttcagttcccttagataaagacttcaggaagtatactgcatttaccatacctagtataaacaatgagacaccagggattagatatcagtacaatgtgcttccacagggatggaaaggatcaccagcaatattccagtgtagcatgacaaaaatcttagagccttttagaaaacaaaatccagacatagtcatctatcaatacatggatgatttgtatgtaggatctgacttagaaatagggcagcatagaacaaaaatagaggaactgagacaacatctgttgaggtggggatttaccacaccagacaaaaaacatcagaaagaacctccattcctttggatgggttatgaactccatcctgataaatggacagtacagcctatagtgctgccagaaaaggacagctggactgtcaatgacatacagaaattagtgggaaaattgaattgggcaagtcagatttatgcagggattaaagtaaggcaattatgtaaacttcttaggggaaccaaagcactaacagaagtagtaccactaacagaagaagcagagctagaactggcagaaaacagggagattctaaaagaaccggtacatggagtgtattatgacccatcaaaagacttaatagcagaaatacagaagcaggggcaaggccaatggacatatcaaatttatcaagagccatttaaaaatctgaaaacaggaaagtatgcaagaatgaacgaatctgccgttgccatatacagcatctgaacaagctgatcgaacccttcatggacggttaaggccgcctgttggtgggcggggatcaagcaggaatttggcattccctacaatccccaaagtcaaggagtaatagaatctatgaataaagaattaaagaaaattataggacaggtaagagatcaggctgaacatcttaagacagcagtacaaatggcagtattcatccacaattttaaaagaaaaggggggattggggggtacagtgcaggggaaagaatagtagacataatagcaacagacatacaaactaaagaattacaaaaacaaattacaaaaattcaaaattttcgggtttattacagggacagcagagatccagtttggaaaggaccagcaaagctcctctggaaaggtgaaggggcagtagtaatacaagataatagtgacataaaagtagtgccaagaagaaaagcaaagatcatcagggattatggaaaacagatggcaggtgatgattgtgtggcaagtagacaggatgaggattaacacatggaaaagattagtaaaacaccatatgtatatttcaaggaaagctaaggactggttttatagacatcactatgaaagtactaatccaaaaataagttcagaagtacacatcccactaggggatgctaaattagtaataacaacatattggggtctgcatacaggagaaagagactggcatttgggtcagggagtctccatagaatggaggaaaaagagatatagcacacaagtagaccctgacctagcagaccaactaattcatctgcactattttgattgtttttcagaatctgctataagaaataccatattaggacgtatagttagtcctaggtgtgaatatcaagcaggacataacaaggtaggatctctacagtacttggcactagcagcattaataaaaccaaaacagataaagccacctttgcctagtgttaggaaactgacagaggacagatggaacaagccccagaagaccaagggccacagagggagccatacaatgaatggacactagagcttttagaggaacttaagagtgaagctgttagacattttcctaggatatggctccataacttaggacaacatatctatgaaacttacggggatacttgggcaggagtggaagccataataagaattctgcaacaactgctgtttatccatttcagaattgggtgtcgacatagcagaataggcgttactcgacagaggagagcaagaaatggagccagtagatcctagactagagccctggaagcatccaggaagtcagcctaaaactgcttgtaccaattgctattgtaaaaagtgttgctttcattgccaagtttgtttcatgacaaaagccttaggcatctcctatggcaggaagaagcggagacagcgacgaagagctcatcagaacagtcagactcatcaagcttctctatcaaagcagtaagtagtacatgtaatgcaacctataatagtagcaatagtagcattagtagtagcaataataatagcaatagttgtgtggtccatagtaatcatagaatataggaaaatattaagacaaagaaaaatagacaggttaattgatagactaatagaaagagcagaagacagtggcaatgagagtgaaggagaagtatcagcacttgtggagatgggggtggaaatggggcaccatgctccttgggatattgatgatctgtagtgctacagaaaaattgtgggtcacagtctattatggggtacctgtgtggaaggaagcaaccaccactctattttgtgcatcagatgctaaagcatatgatacagaggtacataatgtttgggccacacatgcctgtgtacccacagaccccaacccacaagaagtagtattggtaaatgtgacagaaaattttaacatgtggaaaaatgacatggtagaacagatgcatgaggatataatcagtttatgggatcaaagcctaaagccatgtgtaaaattaaccccactctgtgttagtttaaagtgcactgatttgaagaatgatactaataccaatagtagtagcgggagaatgataatggagaaaggagagataaaaaactgctctttcaatatcagcacaagcataagagataaggtgcagaaagaatatgcattcttttataaacttgatatagtaccaatagataataccagctataggttgataagttgtaacacctcagtcattacacaggcctgtccaaaggtatcctttgagccaattcccatacattattgtgccccggctggttttgcgattctaaaatgtaataataagacgttcaatggaacaggaccatgtacaaatgtcagcacagtacaatgtacacatggaatcaggccagtagtatcaactcaactgctgttaaatggcagtctagcagaagaagatgtagtaattagatctgccaatttcacagacaatgctaaaaccataatagtacagctgaacacatctgtagaaattaattgtacaagacccaacaacaatacaagaaaaagtatccgtatccagaggggaccagggagagcatttgttacaataggaaaaataggaaatatgagacaagcacattgtaacattagtagagcaaaatggaatgccactttaaaacagatagctagcaaattaagagaacaatttggaaataataaaacaataatctttaagcaatcctcaggaggggacccagaaattgtaacgcacagttttaattgtggaggggaatttttctactgtaattcaacacaactgtttaatagtacttggtttaatagtacttggagtactgaagggtcaaataacactgaaggaagtgacacaatcacactcccatgcagaataaaacaatttataaacatgtggcaggaagtaggaaaagcaatgtatgcccctcccatcagtggacaaattagatgttcatcaaatattactgggctgctattaacaagagatggtggtaataacaacaatgggtccgagatcttcagacctggaggaggcgatatgagggacaattggagaagtgaattatataaatataaagtagtaaaaattgaaccattaggagtagcacccaccaaggcaaagagaagagtggtgcagagagaaaaaagagcagtgggaataggagctttgttccttgggttcttgggagcagcaggaagcactatgggcgcagcgtcaatgacgctgacggtacaggccagacaattattgtctgatatagtgcagcagcagaacaatttgctgagggctattgaggcgcaacagcatctgttgcaactcacagtctggggcatcaaacagctccaggcaagaatcctggctgtggaaagatacctaaaggatcaacagctcctggggatttggggttgctctggaaaactcatttgcaccactgctgtgccttggaatgctagttggagtaataaatctctggaacagatttggaataacatgacctggatggagtgggacagagaaattaacaattacacaagcttaatacactccttaattgaagaatcgcaaaaccagcaagaaaagaatgaacaagaattattggaattagataaatgggcaagtttgtggaattggtttaacataacaaattggctgtggtatataaaattattcataatgatagtaggaggcttggtaggtttaagaatagtttttgctgtactttctatagtgaatagagttaggcagggatattcaccattatcgtttcagacccacctcccaatcccgaggggacccgacaggcccgaaggaatagaagaagaaggtggagagagagacagagacagatccattcgattagtgaacggatccttagcacttatctgggacgatctgcggagcctgtgcctcttcagctaccaccgcttgagagacttactcttgattgtaacgaggattgtggaacttctgggacgcagggggtgggaagccctcaaatattggtggaatctcctacagtattggagtcaggaactaaagaatagtgctgttaacttgctcaatgccacagccatagcagtagctgaggggacagatagggttatagaagtattacaagcagcttatagagctattcgccacatacctagaagaataagacagggcttggaaaggattttgctataagatgggtggcaagtggtcaaaaagtagtgtgattggatggcctgctgtaagggaaagaatgagacgagctgagccagcagcagatggggtgggagcagtatctcgagacctagaaaaacatggagcaatcacaagtagcaatacagcagctaacaatgctgcttgtgcctggctagaagcacaagaggaggaagaggtgggttttccagtcacacctcaggtacctttaagaccaatgacttacaaggcagctgtagatcttagccactttttaaaagaaaaggggggactggaagggctaattcactcccaaagaagacaagatatccttgatctgtggatctaccacacacaaggctacttccctgattggcagaactacacaccagggccaggggtcagatatccactgacctttggatggtgctacaagctagtaccagttgagccagataaggtagaagaggccaataaaggagagaacaccagcttgttacaccctgtgagcctgcatggaatggatgaccctgagagagaagtgttagagtggaggtttgacagccgcctagcatttcatcacgtggcccgagagctgcatccggagtacttcaagaactgctgacatcgagcttgctacaagggactttccgctggggactttccagggaggcgtggcctgggcgggactggggagtggcgagccctcagatgctgcatataagcagctgctttttgcctgtactgggtctctctggttagaccagatctgagcctgggagctctctggctaactagggaacccactgcttaagcctcaataaagcttgccttgagtgcttcaagtagtgtgtgcccgtctgttgtgtgactctggtaactagagatccctcagacccttttagtcagtgtggaaaatctctagca

SEQ ID NO: 104 - DNA, 7100 bp, Artificial Sequence
  Synthetic Sequence
tggaagggctaatttggtcccaaaaaagacaagagatccttgatctgtggatctaccacacacaaggctacttccctgattggcagaactacacaccagggccagggatcagatatccactgacctttggatggtgcttcaagttagtaccagttgaaccagagcaagtagaagaggccaatgaaggagagaacaacagcttgttacaccctatgagccagcatgggatggaggacccggagggagaagtattagtgtggaagtttgacagcctcctagcatttcgtcacatggcccgagagctgcatccggagtactacaaagactgctgacatcgagctttctacaagggactttccgctggggactttccagggaggtgtggcctgggcgggactggggagtggcgagccctcagatgctacatataagcagctgctttttgcctgtactgggtctctctggttagaccagatctgagcctgggagctctctggctaactagggaacccactgcttaagcctcaataaagcttgccttgagtgctcaaagtagtgtgtgcccgtctgttgtgtgactctggtaactagagatccctcagacccttttagtcagtgtggaaaatctctagcagtggcgcccgaacagggacttgaaagcgaaagtaaagccagaggagatctctcgacgcaggactcggcttgctgaagcgcgcacggcaagaggcgaggggcggcgactggtgagtacgccaaaaattttgactagcggaggctagaaggagagagatgggtgcgagagcgtcggtattaagcgggggagaattagataaatgggaaaaaattcggttaaggccagggggaaagaaacaatataaactaaaacatatagtatgggcaagcagggagctagaacgattcgcagttaatcctggccttttagagacatcagaaggctgtagacaaatactgggacagctacaaccatcccttcagacaggatcagaagaacttagatcattatataatacaatagcagtcctctattgtgtgcatcaaaggatagatgtaaaagacaccaaggaagccttagataagatagaggaagagcaaaacaaaagtaagaaaaaggcacagcaagcagcagctgacacaggaaacaacagccaggtcagccaaaattaccctatagtgcagaacctccaggggcaaatggtacatcaggccatatcacctagaactttaaatgcatgggtaaaagtagtagaagagaaggctttcagcccagaagtaatacccatgttttcagcattatcagaaggagccaccccacaagatttaaataccatgctaaacacagtggggggacatcaagcagccatgcaaatgttaaaagagaccatcaatgaggaagctgcagaatgggatagattgcatccagtgcatgcagggcctattgcaccaggccagatgagagaaccaagaccgtccatgaagggttcgatggggggcggcgattacttgttatggcaacggcagattcgttaaaggaagctctattagatacaggagcagatgatacagtattagaagaaatgaatttgccaggaagatggaaaccaaaaatgatagggggaattggaggttttatcaaagtaagacagtatgatcagatactcatagaaatctgcggacataaagctataggtacagtattagtaggacctacacctgtcaacataattggaagaaatctgttgactcagattggctgcactttaaattttcccattagtcctattgagactgtaccagtaaaattaaagccaggaatggatggcccaaaagttaaacaatggccattgacagaagaaaaaataaaagcattagtagaaatttgtacagaaatggaaaaggaaggaaaaatttcaaaaattgggcctgaaaatccatacaatactccagtatttgccataaagaaaaaagacagtactaaatggagaaaattagtagatttcagagaacttaataagagaactcaagatttctgggaagttcaattaggaataccacatcctgcagggttaaaacagaaaaaatcagtaacagtactggatgtgggcgatgcatatttttcagttcccttagataaagacttcaggaagtatactgcatttaccatacctagtataaacaatgagacaccagggattagatatcagtacaatgtgcttccacagggatggaaaggatcaccagcaatattccagtgtagcatgacaaaaatcttagagccttttagaaaacaaaatccagacatagtcatctatcaatacatggatgatttgtatgtaggatctgacttagaaatagggcagcatagaacaaaaatagaggaactgagacaacatctgttgaggtggggatttaccacaccagacaaaaaacatcagaaagaacctccattcctttggatgggttatgaactccatcctgataaatggacagtacagcctatagtgctgccagaaaaggacagctggactgtcaatgacatacagaaattagtgggaaaattgaattgggcaagtcagatttatgcagggattaaagtaaggcaattatgtaaacttcttaggggaaccaaagcactaacagaagtagtaccactaacagaagaagcagagctagaactggcagaaaacagggagattctaaaagaaccggtacatggagtgtattatgacccatcaaaagacttaatagcagaaatacagaagcaggggcaaggccaatggacatatcaaatttatcaagagccatttaaaaatctgaaaacaggaaagtatgcaagaatgaacgaatctgccgttgccatatacagcatctgaacaagctgatcgaacccttcatggacggttaaggccgcctgttggtgggcggggatcaagcaggaatttggcattccctacaatccccaaagtcaaggagtaatagaatctatgaataaagaattaaagaaaattataggacaggtaagagatcaggctgaacatcttaagacagcagtacaaatggcagtattcatccacaattttaaaagaaaaggggggattggggggtacagtgcaggggaaagaatagtagacataatagcaacagacatacaaactaaagaattacaaaaacaaattacaaaaattcaaaattttcgggtttattacagggacagcagagatccagtttggaaaggaccagcaaagctcctctggaaaggtgaaggggcagtagtaatacaagataatagtgacataaaagtagtgccaagaagaaaagcaaagatcatcagggattatggaaaacagatggcaggtgatgattgtgtggcccgtccatgaagggttcgattcttgaacagcgcggtctgttatggcaacggcagattcgtttaatgcaacctataatagtagcaatagtagcattagtagtagcaataataatagcaatagttgtgtggtccatagtaatcatagaatataggaaaatattaagacaaagaaaaatagacaggttaattgatagactaatagaaagagcagaagacagtggcaatgagagtgaaggagaagtatcagcacttgtggagatgggggtggaaatggggcaccatgctccttgggatattgatgatctgtagtgctacagaaaaattgtgggtcacagtctattatggggtacctgtgtggaaggaagcaaccaccactctattttgtgcatcagatgctaaagcatatgatacagaggtacataatgtttgggccacacatgcctgtgtacccacagaccccaacccacaagaagtagtattggtaaatgtgacagaaaattttaacatgtggaaaaatgacatggtagaacagatgcatgaggatataatcagtttatgggatcaaagcctaaagccatgtgtaaaattaaccccactctgtgttagtttaaagtgcactgatttgaagaatgatactaataccaatagtagtagcgggagaatgataatggagaaaggagagataaaaaactgctctttcaatatcagcacaagcataagagataaggtgcagaaagaatatgcattcttttataaacttgatatagtaccaatagataataccagctataggttgataagttgtaacacctcagtcattacacaggcctgtccaaaggtatcctttgagccaattcccatacattattgtgccccggctggttttgcgattctaaaatgtaataataagacgttcaatggaacaggaccatgtacaaatgtcagcacagtacaatgtacacatggaatcaggccagtagtatcaactcaactgctgttaaatggcagtctagcagaagaagatgtagtaattagatctgccaatttcacagacaatgctaaaaccataatagtacagctgaacacatctgtagaaattaattgtacaagacccaacaacaatacaagaaaaagtatccgtatccagaggggaccagggagagcatttgttacaataggaaaaataggaaatatgagacaagcacattgtaacattagtagagcaaaatggaatgccactttaaaacagatagctagcaaattaagagaacaatttggaaataataaaacaataatctttaagcaatcctcaggaggggacccagaaattgtaacgcacagttttaattgtggaggggaatttttctactgtaattcaacacaactgtttaatagtacttggtttaatagtacttggagtactgaagggtcaaataacactgaaggaagtgacacaatcacactcccatgcagaataaaacaatttataaacatgtggcaggaagtaggaaaagcaatgtatgcccctcccatcagtggacaaattagatgttcatcaaatattactgggctgctattaacaagagatggtggtaataacaacaatgggtccgagatcttcagacctggaggaggcgatatgagggacaattggagaagtgaattatataaatataaagtagtaaaaattgaaccattaggagtagcacccaccaaggcaaagagaagagtggtgcagagagaaaaaagagcagtgggaataggagctttgttccttgggttcttgggagcagcaggaagcactatgggcgcagcgtcaatgacgctgacggtacaggccagacaattattgtctgatatagtgcagcagcagaacaatttgctgagggctattgaggcgcaacagcatctgttgcaactcacagtctggggcatcaaacagctccaggcaagaatcctggctgtggaaagatacctaaaggatcaacagctcctggggatttggggttgctctggaaaactcatttgcaccactgctgtgccttggaatgctagttggagtaataaatctctggaacagatttggaataacatgacctggatggagtgggacagagaaattaacaattacacaagcttaatacactccttaattgaagaatcgcaaaaccagcaagaaaagaatgaacaagaattattggaattagataaatgggcaagtttgtggaattggtttaacataacaaattggctgtggtatataaaattattcataatgatagtaggaggcttggtaggtttaagaatagtttttgctgtactttctatagtgaatagagttaggcagggatattcaccattatcgtttcagacccacctcccaatcccgaggggacccgacaggcccgaaggaatagaagaagaaggtggagagagagacagagacagatccattcgattagtgaacggatccttagcacttatctgggacgatctgcggagcctgtgcctcttcagctaccaccgcttgagagacttactcttgattgtaacgaggattgtggaacttctgggacgcagggggtgggaagccctcaaatattggtggaatctcctacagtattggagtcaggaactaaagaatagtgctgttaacttgctcaatgccacagccatagcagtagctgaggggacagatagggttatagaagtattacaagcagcttatagagctattcgccacatacctagaagaataagacagggcttggaaaggattttgctataagatgggtggcaagtggtcaaaaagtagtgtgattggatggcctgctgtaagggaaagaatgagacgagctgagccagcagcagatggggtgggagcagtatctcgagacctagaaaaacatggagcaatcacaagtagcaatacagcagctaacaatgctgcttgtgcctggctagaagcacaagaggaggaagaggtgggttttccagtcacacctcaggtacctttaagaccaatgacttacaaggcagctgtagatcttagccactttttaaaagaaaaggggggactggaagggctaattcactcccaaagaagacaagatatccttgatctgtggatctaccacacacaaggctacttccctgattggcagaactacacaccagggccaggggtcagatatccactgacctttggatggtgctacaagctagtaccagttgagccagataaggtagaagaggccaataaaggagagaacaccagcttgttacaccctgtgagcctgcatggaatggatgaccctgagagagaagtgttagagtggaggtttgacagccgcctagcatttcatcacgtggcccgagagctgcatccggagtacttcaagaactgctgacatcgagcttgctacaagggactttccgctggggactttccagggaggcgtggcctgggcgggactggggagtggcgagccctcagatgctgcatataagcagctgctttttgcctgtactgggtctctctggttagaccagatctgagcctgggagctctctggctaactagggaacccactgcttaagcctcaataaagcttgccttgagtgcttcaagtagtgtgtgcccgtctgttgtgtgactctggtaactagagatccctcagacccttttagtcagtgtggaaaatctctagca

SEQ ID NO: 105 - DNA, 6875 bp, Artificial Sequence
  Synthetic Sequence
tggaagggctaatttggtcccaaaaaagacaagagatccttgatctgtggatctaccacacacaaggctacttccctgattggcagaactacacaccagggccagggatcagatatccactgacctttggatggtgcttcaagttagtaccagttgaaccagagcaagtagaagaggccaatgaaggagagaacaacagcttgttacaccctatgagccagcatgggatggaggacccggagggagaagtattagtgtggaagtttgacagcctcctagcatttcgtcacatggcccgagagctgcatccggagtactacaaagactgctgacatcgagctttctacaagggactttccgctggggactttccagggaggtgtggcctgggcgggactggggagtggcgagccctcagatgctacatataagcagctgctttttgcctgtactgggtctctctggttagaccagatctgagcctgggagctctctggctaactagggaacccactgcttaagcctcaataaagcttgccttgagtgctcaaagtagtgtgtgcccgtctgttgtgtgactctggtaactagagatccctcagacccttttagtcagtgtggaaaatctctagcagtggcgcccgaacagggacttgaaagcgaaagtaaagccagaggagatctctcgacgcaggactcggcttgctgaagcgcgcacggcaagaggcgaggggcggcgactggtgagtacgccaaaaattttgactagcggaggctagaaggagagagatgggtgcgagagcgtcggtattaagcgggggagaattagataaatgggaaaaaattcggttaaggccagggggaaagaaacaatataaactaaaacatatagtatgggcaagcagggagctagaacgattcgcagttaatcctggccttttagagacatcagaaggctgtagacaaatactgggacagctacaaccatcccttcagacaggatcagaagaacttagatcattatataatacaatagcagtcctctattgtgtgcatcaaaggatagatgtaaaagacaccaaggaagccttagataagatagaggaagagcaaaacaaaagtaagaaaaaggcacagcaagcagcagctgacacaggaaacaacagccaggtcagccaaaattaccctatagtgcagaacctccaggggcaaatggtacatcaggccatatcacctagaactttaaatgcatgggtaaaagtagtagaagagaaggctttcagcccagaagtaatacccatgttttcagcattatcagaaggagccaccccacaagatttaaataccatgctaaacacagtggggggacatcaagcagccatgcaaatgttaaaagagaccatcaatgaggaagctgcagaatgggatagattgcatccagtgcatgcagggcctattgcaccaggccagatgagagaaccaagaccgtccatgaagggttcgatggggggcggcgattacttgttatggcaacggcagattcgttaaaggaagctctattagatacaggagcagatgatacagtattagaagaaatgaatttgccaggaagatggaaaccaaaaatgatagggggaattggaggttttatcaaagtaagacagtatgatcagatactcatagaaatctgcggacataaagctataggtacagtattagtaggacctacacctgtcaacataattggaagaaatctgttgactcagattggctgcactttaaattttcccattagtcctattgagactgtaccagtaaaattaaagccaggaatggatggcccaaaagttaaacaatggccattgacagaagaaaaaataaaagcattagtagaaatttgtacagaaatggaaaaggaaggaaaaatttcaaaaattgggcctgaaaatccatacaatactccagtatttgccataaagaaaaaagacagtactaaatggagaaaattagtagatttcagagaacttaataagagaactcaagatttctgggaagttcaattaggaataccacatcctgcagggttaaaacagaaaaaatcagtaacagtactggatgtgggcgatgcatatttttcagttcccttagataaagacttcaggaagtatactgcatttaccatacctagtataaacaatgagacaccagggattagatatcagtacaatgtgcttccacagggatggaaaggatcaccagcaatattccagtgtagcatgacaaaaatcttagagccttttagaaaacaaaatccagacatagtcatctatcaatacatggatgatttgtatgtaggatctgacttagaaatagggcagcatagaacaaaaatagaggaactgagacaacatctgttgaggtggggatttaccacaccagacaaaaaacatcagaaagaacctccattcctttggatgggttatgaactccatcctgataaatggacagtacagcctatagtgctgccagaaaaggacagctggactgtcaatgacatacagaaattagtgggaaaattgaattgggcaagtcagatttatgcagggattaaagtaaggcaattatgtaaacttcttaggggaaccaaagcactaacagaagtagtaccactaacagaagaagcagagctagaactggcagaaaacagggagattctaaaagaaccggtacatggagtgtattatgacccatcaaaagacttaatagcagaaatacagaagcaggggcaaggccaatggacatatcaaatttatcaagagccatttaaaaatctgaaaacaggaaagtatgcaagaatgaacgaatctgccgttgccatatacagcatctgaacaagctgatcgaacccttcatggacggttaaggccgcctgttggtgggcggggatcaagcaggaatttggcattccctacaatccccaaagtcaaggagtaatagaatctatgaataaagaattaaagaaaattataggacaggtaagagatcaggctgaacatcttaagacagcagtacaaatggcagtattcatccacaattttaaaagaaaaggggggattggggggtacagtgcaggggaaagaatagtagacataatagcaacagacatacaaactaaagaattacaaaaacaaattacaaaaattcaaaattttcgggtttattacagggacagcagagatccagtttggaaaggaccagcaaagctcctctggaaaggtgaaggggcagtagtaatacaagataatagtgacataaaagtagtgccaagaagaaaagcaaagatcatcagggattaaccgtccatgaagggttcgattatctgtagccaacattcgatatggcaacggcagattcgttggagatgggggtggaaatggggcaccatgctccttgggatattgatgatctgtagtgctacagaaaaattgtgggtcacagtctattatggggtacctgtgtggaaggaagcaaccaccactctattttgtgcatcagatgctaaagcatatgatacagaggtacataatgtttgggccacacatgcctgtgtacccacagaccccaacccacaagaagtagtattggtaaatgtgacagaaaattttaacatgtggaaaaatgacatggtagaacagatgcatgaggatataatcagtttatgggatcaaagcctaaagccatgtgtaaaattaaccccactctgtgttagtttaaagtgcactgatttgaagaatgatactaataccaatagtagtagcgggagaatgataatggagaaaggagagataaaaaactgctctttcaatatcagcacaagcataagagataaggtgcagaaagaatatgcattcttttataaacttgatatagtaccaatagataataccagctataggttgataagttgtaacacctcagtcattacacaggcctgtccaaaggtatcctttgagccaattcccatacattattgtgccccggctggttttgcgattctaaaatgtaataataagacgttcaatggaacaggaccatgtacaaatgtcagcacagtacaatgtacacatggaatcaggccagtagtatcaactcaactgctgttaaatggcagtctagcagaagaagatgtagtaattagatctgccaatttcacagacaatgctaaaaccataatagtacagctgaacacatctgtagaaattaattgtacaagacccaacaacaatacaagaaaaagtatccgtatccagaggggaccagggagagcatttgttacaataggaaaaataggaaatatgagacaagcacattgtaacattagtagagcaaaatggaatgccactttaaaacagatagctagcaaattaagagaacaatttggaaataataaaacaataatctttaagcaatcctcaggaggggacccagaaattgtaacgcacagttttaattgtggaggggaatttttctactgtaattcaacacaactgtttaatagtacttggtttaatagtacttggagtactgaagggtcaaataacactgaaggaagtgacacaatcacactcccatgcagaataaaacaatttataaacatgtggcaggaagtaggaaaagcaatgtatgcccctcccatcagtggacaaattagatgttcatcaaatattactgggctgctattaacaagagatggtggtaataacaacaatgggtccgagatcttcagacctggaggaggcgatatgagggacaattggagaagtgaattatataaatataaagtagtaaaaattgaaccattaggagtagcacccaccaaggcaaagagaagagtggtgcagagagaaaaaagagcagtgggaataggagctttgttccttgggttcttgggagcagcaggaagcactatgggcgcagcgtcaatgacgctgacggtacaggccagacaattattgtctgatatagtgcagcagcagaacaatttgctgagggctattgaggcgcaacagcatctgttgcaactcacagtctggggcatcaaacagctccaggcaagaatcctggctgtggaaagatacctaaaggatcaacagctcctggggatttggggttgctctggaaaactcatttgcaccactgctgtgccttggaatgctagttggagtaataaatctctggaacagatttggaataacatgacctggatggagtgggacagagaaattaacaattacacaagcttaatacactccttaattgaagaatcgcaaaaccagcaagaaaagaatgaacaagaattattggaattagataaatgggcaagtttgtggaattggtttaacataacaaattggctgtggtatataaaattattcataatgatagtaggaggcttggtaggtttaagaatagtttttgctgtactttctatagtgaatagagttaggcagggatattcaccattatcgtttcagacccacctcccaatcccgaggggacccgacaggcccgaaggaatagaagaagaaggtggagagagagacagagacagatccattcgattagtgaacggatccttagcacttatctgggacgatctgcggagcctgtgcctcttcagctaccaccgcttgagagacttactcttgattgtaacgaggattgtggaacttctgggacgcagggggtgggaagccctcaaatattggtggaatctcctacagtattggagtcaggaactaaagaatagtgctgttaacttgctcaatgccacagccatagcagtagctgaggggacagatagggttatagaagtattacaagcagcttatagagctattcgccacatacctagaagaataagacagggcttggaaaggattttgctataagatgggtggcaagtggtcaaaaagtagtgtgattggatggcctgctgtaagggaaagaatgagacgagctgagccagcagcagatggggtgggagcagtatctcgagacctagaaaaacatggagcaatcacaagtagcaatacagcagctaacaatgctgcttgtgcctggctagaagcacaagaggaggaagaggtgggttttccagtcacacctcaggtacctttaagaccaatgacttacaaggcagctgtagatcttagccactttttaaaagaaaaggggggactggaagggctaattcactcccaaagaagacaagatatccttgatctgtggatctaccacacacaaggctacttccctgattggcagaactacacaccagggccaggggtcagatatccactgacctttggatggtgctacaagctagtaccagttgagccagataaggtagaagaggccaataaaggagagaacaccagcttgttacaccctgtgagcctgcatggaatggatgaccctgagagagaagtgttagagtggaggtttgacagccgcctagcatttcatcacgtggcccgagagctgcatccggagtacttcaagaactgctgacatcgagcttgctacaagggactttccgctggggactttccagggaggcgtggcctgggcgggactggggagtggcgagccctcagatgctgcatataagcagctgctttttgcctgtactgggtctctctggttagaccagatctgagcctgggagctctctggctaactagggaacccactgcttaagcctcaataaagcttgccttgagtgcttcaagtagtgtgtgcccgtctgttgtgtgactctggtaactagagatccctcagacccttttagtcagtgtggaaaatctctagca

SEQ ID NO: 106 - DNA, 7989 bp, Artificial Sequence
  Synthetic Sequence
tggaagggctaatttggtcccaaaaaagacaagagatccttgatctgtggatctaccacacacaaggctacttccctgattggcagaactacacaccagggccagggatcagatatccactgacctttggatggtgcttcaagttagtaccagttgaaccagagcaagtagaagaggccaatgaaggagagaacaacagcttgttacaccctatgagccagcatgggatggaggacccggagggagaagtattagtgtggaagtttgacagcctcctagcatttcgtcacatggcccgagagctgcatccggagtactacaaagactgctgacatcgagctttctacaagggactttccgctggggactttccagggaggtgtggcctgggcgggactggggagtggcgagccctcagatgctacatataagcagctgctttttgcctgtactgggtctctctggttagaccagatctgagcctgggagctctctggctaactagggaacccactgcttaagcctcaataaagcttgccttgagtgctcaaagtagtgtgtgcccgtctgttgtgtgactctggtaactagagatccctcagacccttttagtcagtgtggaaaatctctagcagtggcgcccgaacagggacttgaaagcgaaagtaaagccagaggagatctctcgacgcaggactcggcttgctgaagcgcgcacggcaagaggcgaggggcggcgactggtgagtacgccaaaaattttgactagcggaggctagaaggagagagatgggtgcgagagcgtcggtattaagcgggggagaattagataaatgggaaaaaattcggttaaggccagggggaaagaaacaatataaactaaaacatatagtatgggcaagcagggagctagaacgattcgcagttaatcctggccttttagagacatcagaaggctgtagacaaatactgggacagctacaaccatcccttcagacaggatcagaagaacttagatcattatataatacaatagcagtcctctattgtgtgcatcaaaggatagatgtaaaagacaccaaggaagccttagataagatagaggaagagcaaaacaaaagtaagaaaaaggcacagcaagcagcagctgacacaggaaacaacagccaggtcagccaaaattaccctatagtgcagaacctccaggggcaaatggtacatcaggccatatcacctagaactttaaatgcatgggtaaaagtagtagaagagaaggctttcagcccagaagtaatacccatgttttcagcattatcagaaggagccaccccacaagatttaaataccatgctaaacacagtggggggacatcaagcagccatgcaaatgttaaaagagaccatcaatgaggaagctgcagaatgggatagattgcatccagtgcatgcagggcctattgcaccaggccaaccgtccatgaagggttcgatgagctgcagggcatgttatatatggcaacggcagattcgttcaggagcagatgatacagtattagaagaaatgaatttgccaggaagatggaaaccaaaaatgatagggggaattggaggttttatcaaagtaagacagtatgatcagatactcatagaaatctgcggacataaagctataggtacagtattagtaggacctacacctgtcaacataattggaagaaatctgttgactcagattggctgcactttaaattttcccattagtcctattgagactgtaccagtaaaattaaagccaggaatggatggcccaaaagttaaacaatggccattgacagaagaaaaaataaaagcattagtagaaatttgtacagaaatggaaaaggaaggaaaaatttcaaaaattgggcctgaaaatccatacaatactccagtatttgccataaagaaaaaagacagtactaaatggagaaaattagtagatttcagagaacttaataagagaactcaagatttctgggaagttcaattaggaataccacatcctgcagggttaaaacagaaaaaatcagtaacagtactggatgtgggcgatgcatatttttcagttcccttagataaagacttcaggaagtatactgcatttaccatacctagtataaacaatgagacaccagggattagatatcagtacaatgtgcttccacagggatggaaaggatcaccagcaatattccagtgtagcatgacaaaaatcttagagccttttagaaaacaaaatccagacatagtcatctatcaatacatggatgatttgtatgtaggatctgacttagaaatagggcagcatagaacaaaaatagaggaactgagacaacatctgttgaggtggggatttaccacaccagacaaaaaacatcagaaagaacctccattcctttggatgggttatgaactccatcctgataaatggacagtacagcctatagtgctgccagaaaaggacagctggactgtcaatgacatacagaaattagtgggaaaattgaattgggcaagtcagatttatgcagggattaaagtaaggcaattatgtaaacttcttaggggaaccaaagcactaacagaagtagtaccactaacagaagaagcagagctagaactggcagaaaacagggagattctaaaagaaccggtacatggagtgtattatgacccatcaaaagacttaatagcagaaatacagaagcaggggcaaggccaatggacatatcaaatttatcaagagccatttaaaaatctgaaaacaggaaagtatgcaagaatgaagggtgcccacactaatgatgtgaaacaattaacagaggcagtacaaaaaatagccacagaaagcatagtaatatggggaaagactcctaaatttaaattacccatacaaaaggaaacatgggaagcatggtggacagagtattggcaagccacctggattcctgagtgggagtttgtcaatacccctcccttagtgaagttatggtaccagttagagaaagaacccataataggagcagaaactttctatgtagatggggcagccaatagggaaactaaattaggaaaagcaggatatgtaactgacagaggaagacaaaaagttgtccccctaacggacacaacaaatcagaagactgagttacaagcaattcatctagctttgcaggattcgggattagaagtaaacatagtgacagactcacaatatgcattgggaatcattcaagcacaaccagataagagtgaatcagagttagtcagtcaaataatagagcagttaataaaaaaggaaaaagtctacctggcatgggtaccagcacacaaaggaattggaggaaatgaacaagtagataaattggtcagtgctggaatcaggaaagtactatttttagatggaatagataaggcccaagaagaacatgagaaatatcacagtaattggagagcaatggctagtgattttaacctaccacctgtagtagcaaaagaaatagtagccagctgtgataaatgtcagctaaaaggggaagccatgcatggacaagtagactgtagcccaggaatatggcagctagattgtacacatttagaaggaaaagttatcttggtagcagttcatgtagccagtggatatatagaagcagaagtaattccagcagagacagggcaagaaacagcatacttcctcttaaaattagcaggaagatggccagtaaaaacagtacatacagacaatggcagcaatttcaccagtactacagttaaggccgcctgttggtgggcggggatcaagcaggaatttggcattccctacaatccccaaagtcaaggagtaatagaatctatgaataaagaattaaagaaaattataggacaggtaagagatcaggctgaacatcttaagacagcagtacaaatggcagtattcatccacaattttaaaagaaaaggggggattggggggtacagtgcaggggaaagaatagtagacataatagcaacagacatacaaactaaagaattacaaaaacaaattacaaaaattcaaaattttcgggtttattacagggacagcagagatccagtttggaaaggaccagcaaagctcctctggaaaggtgaaggggcagtagtaatacaagataatagtgacataaaagtagtgccaagaagaaaagcaaagatcatcagggattatggaaaacagatggcaggtgatgattgtgtggcccgtccatgaagggttcgattcttgaacagcgcggtctgttatggcaacggcagattcgtttaatgcaacctataatagtagcaatagtagcattagtagtagcaataataatagcaatagttgtgtggtccatagtaatcatagaatataggaaaatattaagacaaagaaaaatagacaggttaattgatagactaatagaaagagcagaagacagtggcaatgagagtgaaggagaagtatcagcacttgtggagatgggggtggaaatggggcaccatgctccttgggatattgatgatctgtagtgctacagaaaaattgtgggtcacagtctattatggggtacctgtgtggaaggaagcaaccaccactctattttgtgcatcagatgctaaagcatatgatacagaggtacataatgtttgggccacacatgcctgtgtacccacagaccccaacccacaagaagtagtattggtaaatgtgacagaaaattttaacatgtggaaaaatgacatggtagaacagatgcatgaggatataatcagtttatgggatcaaagcctaaagccatgtgtaaaattaaccccactctgtgttagtttaaagtgcactgatttgaagaatgatactaataccaatagtagtagcgggagaatgataatggagaaaggagagataaaaaactgctctttcaatatcagcacaagcataagagataaggtgcagaaagaatatgcattcttttataaacttgatatagtaccaatagataataccagctataggttgataagttgtaacacctcagtcattacacaggcctgtccaaaggtatcctttgagccaattcccatacattattgtgccccggctggttttgcgattctaaaatgtaataataagacgttcaatggaacaggaccatgtacaaatgtcagcacagtacaatgtacacatggaatcaggccagtagtatcaactcaactgctgttaaatggcagtctagcagaagaagatgtagtaattagatctgccaatttcacagacaatgctaaaaccataatagtacagctgaacacatctgtagaaattaattgtacaagacccaacaacaatacaagaaaaagtatccgtatccagaggggaccagggagagcatttgttacaataggaaaaataggaaatatgagacaagcacattgtaacattagtagagcaaaatggaatgccactttaaaacagatagctagcaaattaagagaacaatttggaaataataaaacaataatctttaagcaatcctcaggaggggacccagaaattgtaacgcacagttttaattgtggaggggaatttttctactgtaattcaacacaactgtttaatagtacttggtttaatagtacttggagtactgaagggtcaaataacactgaaggaagtgacacaatcacactcccatgcagaataaaacaatttataaacatgtggcaggaagtaggaaaagcaatgtatgcccctcccatcagtggacaaattagatgttcatcaaatattactgggctgctattaacaagagatggtggtaataacaacaatgggtccgagatcttcagacctggaggaggcgatatgagggacaattggagaagtgaattatataaatataaagtagtaaaaattgaaccattaggagtagcacccaccaaggcaaagagaagagtggtgcagagagaaaaaagagcagtgggaataggagctttgttccttgggttcttgggagcagcaggaagcactatgggcgcagcgtcaatgacgctgacggtacaggccagacaattattgtctgatatagtgcagcagcagaacaatttgctgagggctattgaggcgcaacagcatctgttgcaactcacagtctggggcatcaaacagctccaggcaagaatcctggctgtggaaagatacctaaaggatcaacagctcctggggatttggggttgctctggaaaactcatttgcaccactgctgtgccttggaatgctagttggagtaataaatctctggaacagatttggaataacatgacctggatggagtgggacagagaaattaacaattacacaagcttaatacactccttaattgaagaatcgcaaaaccagcaagaaaagaatgaacaagaattattggaattagataaatgggcaagtttgtggaattggtttaacataacaaattggctgtggtatataaaattattcataatgatagtaggaggcttggtaggtttaagaatagtttttgctgtactttctatagtgaatagagttaggcagggatattcaccattatcgtttcagacccacctcccaatcccgaggggacccgacaggcccgaaggaatagaagaagaaggtggagagagagacagagacagatccattcgattagtgaacggatccttagcacttatctgggacgatctgcggagcctgtgcctcttcagctaccaccgcttgagagacttactcttgattgtaacgaggattgtggaacttctgggacgcagggggtgggaagccctcaaatattggtggaatctcctacagtattggagtcaggaactaaagaatagtgctgttaacttgctcaatgccacagccatagcagtagctgaggggacagatagggttatagaagtattacaagcagcttatagagctattcgccacatacctagaagaataagacagggcttggaaaggattttgctataagatgggtggcaagtggtcaaaaagtagtgtgattggatggcctgctgtaagggaaagaatgagacgagctgagccagcagcagatggggtgggagcagtatctcgagacctagaaaaacatggagcaatcacaagtagcaatacagcagctaacaatgctgcttgtgcctggctagaagcacaagaggaggaagaggtgggttttccagtcacacctcaggtacctttaagaccaatgacttacaaggcagctgtagatcttagccactttttaaaagaaaaggggggactggaagggctaattcactcccaaagaagacaagatatccttgatctgtggatctaccacacacaaggctacttccctgattggcagaactacacaccagggccaggggtcagatatccactgacctttggatggtgctacaagctagtaccagttgagccagataaggtagaagaggccaataaaggagagaacaccagcttgttacaccctgtgagcctgcatggaatggatgaccctgagagagaagtgttagagtggaggtttgacagccgcctagcatttcatcacgtggcccgagagctgcatccggagtacttcaagaactgctgacatcgagcttgctacaagggactttccgctggggactttccagggaggcgtggcctgggcgggactggggagtggcgagccctcagatgctgcatataagcagctgctttttgcctgtactgggtctctctggttagaccagatctgagcctgggagctctctggctaactagggaacccactgcttaagcctcaataaagcttgccttgagtgcttcaagtagtgtgtgcccgtctgttgtgtgactctggtaactagagatccctcagacccttttagtcagtgtggaaaatctctagca

SEQ ID NO: 107 - DNA, 7764 bp, Artificial Sequence
  Synthetic Sequence
tggaagggctaatttggtcccaaaaaagacaagagatccttgatctgtggatctaccacacacaaggctacttccctgattggcagaactacacaccagggccagggatcagatatccactgacctttggatggtgcttcaagttagtaccagttgaaccagagcaagtagaagaggccaatgaaggagagaacaacagcttgttacaccctatgagccagcatgggatggaggacccggagggagaagtattagtgtggaagtttgacagcctcctagcatttcgtcacatggcccgagagctgcatccggagtactacaaagactgctgacatcgagctttctacaagggactttccgctggggactttccagggaggtgtggcctgggcgggactggggagtggcgagccctcagatgctacatataagcagctgctttttgcctgtactgggtctctctggttagaccagatctgagcctgggagctctctggctaactagggaacccactgcttaagcctcaataaagcttgccttgagtgctcaaagtagtgtgtgcccgtctgttgtgtgactctggtaactagagatccctcagacccttttagtcagtgtggaaaatctctagcagtggcgcccgaacagggacttgaaagcgaaagtaaagccagaggagatctctcgacgcaggactcggcttgctgaagcgcgcacggcaagaggcgaggggcggcgactggtgagtacgccaaaaattttgactagcggaggctagaaggagagagatgggtgcgagagcgtcggtattaagcgggggagaattagataaatgggaaaaaattcggttaaggccagggggaaagaaacaatataaactaaaacatatagtatgggcaagcagggagctagaacgattcgcagttaatcctggccttttagagacatcagaaggctgtagacaaatactgggacagctacaaccatcccttcagacaggatcagaagaacttagatcattatataatacaatagcagtcctctattgtgtgcatcaaaggatagatgtaaaagacaccaaggaagccttagataagatagaggaagagcaaaacaaaagtaagaaaaaggcacagcaagcagcagctgacacaggaaacaacagccaggtcagccaaaattaccctatagtgcagaacctccaggggcaaatggtacatcaggccatatcacctagaactttaaatgcatgggtaaaagtagtagaagagaaggctttcagcccagaagtaatacccatgttttcagcattatcagaaggagccaccccacaagatttaaataccatgctaaacacagtggggggacatcaagcagccatgcaaatgttaaaagagaccatcaatgaggaagctgcagaatgggatagattgcatccagtgcatgcagggcctattgcaccaggccaaccgtccatgaagggttcgatgagctgcagggcatgttatatatggcaacggcagattcgttcaggagcagatgatacagtattagaagaaatgaatttgccaggaagatggaaaccaaaaatgatagggggaattggaggttttatcaaagtaagacagtatgatcagatactcatagaaatctgcggacataaagctataggtacagtattagtaggacctacacctgtcaacataattggaagaaatctgttgactcagattggctgcactttaaattttcccattagtcctattgagactgtaccagtaaaattaaagccaggaatggatggcccaaaagttaaacaatggccattgacagaagaaaaaataaaagcattagtagaaatttgtacagaaatggaaaaggaaggaaaaatttcaaaaattgggcctgaaaatccatacaatactccagtatttgccataaagaaaaaagacagtactaaatggagaaaattagtagatttcagagaacttaataagagaactcaagatttctgggaagttcaattaggaataccacatcctgcagggttaaaacagaaaaaatcagtaacagtactggatgtgggcgatgcatatttttcagttcccttagataaagacttcaggaagtatactgcatttaccatacctagtataaacaatgagacaccagggattagatatcagtacaatgtgcttccacagggatggaaaggatcaccagcaatattccagtgtagcatgacaaaaatcttagagccttttagaaaacaaaatccagacatagtcatctatcaatacatggatgatttgtatgtaggatctgacttagaaatagggcagcatagaacaaaaatagaggaactgagacaacatctgttgaggtggggatttaccacaccagacaaaaaacatcagaaagaacctccattcctttggatgggttatgaactccatcctgataaatggacagtacagcctatagtgctgccagaaaaggacagctggactgtcaatgacatacagaaattagtgggaaaattgaattgggcaagtcagatttatgcagggattaaagtaaggcaattatgtaaacttcttaggggaaccaaagcactaacagaagtagtaccactaacagaagaagcagagctagaactggcagaaaacagggagattctaaaagaaccggtacatggagtgtattatgacccatcaaaagacttaatagcagaaatacagaagcaggggcaaggccaatggacatatcaaatttatcaagagccatttaaaaatctgaaaacaggaaagtatgcaagaatgaagggtgcccacactaatgatgtgaaacaattaacagaggcagtacaaaaaatagccacagaaagcatagtaatatggggaaagactcctaaatttaaattacccatacaaaaggaaacatgggaagcatggtggacagagtattggcaagccacctggattcctgagtgggagtttgtcaatacccctcccttagtgaagttatggtaccagttagagaaagaacccataataggagcagaaactttctatgtagatggggcagccaatagggaaactaaattaggaaaagcaggatatgtaactgacagaggaagacaaaaagttgtccccctaacggacacaacaaatcagaagactgagttacaagcaattcatctagctttgcaggattcgggattagaagtaaacatagtgacagactcacaatatgcattgggaatcattcaagcacaaccagataagagtgaatcagagttagtcagtcaaataatagagcagttaataaaaaaggaaaaagtctacctggcatgggtaccagcacacaaaggaattggaggaaatgaacaagtagataaattggtcagtgctggaatcaggaaagtactatttttagatggaatagataaggcccaagaagaacatgagaaatatcacagtaattggagagcaatggctagtgattttaacctaccacctgtagtagcaaaagaaatagtagccagctgtgataaatgtcagctaaaaggggaagccatgcatggacaagtagactgtagcccaggaatatggcagctagattgtacacatttagaaggaaaagttatcttggtagcagttcatgtagccagtggatatatagaagcagaagtaattccagcagagacagggcaagaaacagcatacttcctcttaaaattagcaggaagatggccagtaaaaacagtacatacagacaatggcagcaatttcaccagtactacagttaaggccgcctgttggtgggcggggatcaagcaggaatttggcattccctacaatccccaaagtcaaggagtaatagaatctatgaataaagaattaaagaaaattataggacaggtaagagatcaggctgaacatcttaagacagcagtacaaatggcagtattcatccacaattttaaaagaaaaggggggattggggggtacagtgcaggggaaagaatagtagacataatagcaacagacatacaaactaaagaattacaaaaacaaattacaaaaattcaaaattttcgggtttattacagggacagcagagatccagtttggaaaggaccagcaaagctcctctggaaaggtgaaggggcagtagtaatacaagataatagtgacataaaagtagtgccaagaagaaaagcaaagatcatcagggattaaccgtccatgaagggttcgattatctgtagccaacattcgatatggcaacggcagattcgttggagatgggggtggaaatggggcaccatgctccttgggatattgatgatctgtagtgctacagaaaaattgtgggtcacagtctattatggggtacctgtgtggaaggaagcaaccaccactctattttgtgcatcagatgctaaagcatatgatacagaggtacataatgtttgggccacacatgcctgtgtacccacagaccccaacccacaagaagtagtattggtaaatgtgacagaaaattttaacatgtggaaaaatgacatggtagaacagatgcatgaggatataatcagtttatgggatcaaagcctaaagccatgtgtaaaattaaccccactctgtgttagtttaaagtgcactgatttgaagaatgatactaataccaatagtagtagcgggagaatgataatggagaaaggagagataaaaaactgctctttcaatatcagcacaagcataagagataaggtgcagaaagaatatgcattcttttataaacttgatatagtaccaatagataataccagctataggttgataagttgtaacacctcagtcattacacaggcctgtccaaaggtatcctttgagccaattcccatacattattgtgccccggctggttttgcgattctaaaatgtaataataagacgttcaatggaacaggaccatgtacaaatgtcagcacagtacaatgtacacatggaatcaggccagtagtatcaactcaactgctgttaaatggcagtctagcagaagaagatgtagtaattagatctgccaatttcacagacaatgctaaaaccataatagtacagctgaacacatctgtagaaattaattgtacaagacccaacaacaatacaagaaaaagtatccgtatccagaggggaccagggagagcatttgttacaataggaaaaataggaaatatgagacaagcacattgtaacattagtagagcaaaatggaatgccactttaaaacagatagctagcaaattaagagaacaatttggaaataataaaacaataatctttaagcaatcctcaggaggggacccagaaattgtaacgcacagttttaattgtggaggggaatttttctactgtaattcaacacaactgtttaatagtacttggtttaatagtacttggagtactgaagggtcaaataacactgaaggaagtgacacaatcacactcccatgcagaataaaacaatttataaacatgtggcaggaagtaggaaaagcaatgtatgcccctcccatcagtggacaaattagatgttcatcaaatattactgggctgctattaacaagagatggtggtaataacaacaatgggtccgagatcttcagacctggaggaggcgatatgagggacaattggagaagtgaattatataaatataaagtagtaaaaattgaaccattaggagtagcacccaccaaggcaaagagaagagtggtgcagagagaaaaaagagcagtgggaataggagctttgttccttgggttcttgggagcagcaggaagcactatgggcgcagcgtcaatgacgctgacggtacaggccagacaattattgtctgatatagtgcagcagcagaacaatttgctgagggctattgaggcgcaacagcatctgttgcaactcacagtctggggcatcaaacagctccaggcaagaatcctggctgtggaaagatacctaaaggatcaacagctcctggggatttggggttgctctggaaaactcatttgcaccactgctgtgccttggaatgctagttggagtaataaatctctggaacagatttggaataacatgacctggatggagtgggacagagaaattaacaattacacaagcttaatacactccttaattgaagaatcgcaaaaccagcaagaaaagaatgaacaagaattattggaattagataaatgggcaagtttgtggaattggtttaacataacaaattggctgtggtatataaaattattcataatgatagtaggaggcttggtaggtttaagaatagtttttgctgtactttctatagtgaatagagttaggcagggatattcaccattatcgtttcagacccacctcccaatcccgaggggacccgacaggcccgaaggaatagaagaagaaggtggagagagagacagagacagatccattcgattagtgaacggatccttagcacttatctgggacgatctgcggagcctgtgcctcttcagctaccaccgcttgagagacttactcttgattgtaacgaggattgtggaacttctgggacgcagggggtgggaagccctcaaatattggtggaatctcctacagtattggagtcaggaactaaagaatagtgctgttaacttgctcaatgccacagccatagcagtagctgaggggacagatagggttatagaagtattacaagcagcttatagagctattcgccacatacctagaagaataagacagggcttggaaaggattttgctataagatgggtggcaagtggtcaaaaagtagtgtgattggatggcctgctgtaagggaaagaatgagacgagctgagccagcagcagatggggtgggagcagtatctcgagacctagaaaaacatggagcaatcacaagtagcaatacagcagctaacaatgctgcttgtgcctggctagaagcacaagaggaggaagaggtgggttttccagtcacacctcaggtacctttaagaccaatgacttacaaggcagctgtagatcttagccactttttaaaagaaaaggggggactggaagggctaattcactcccaaagaagacaagatatccttgatctgtggatctaccacacacaaggctacttccctgattggcagaactacacaccagggccaggggtcagatatccactgacctttggatggtgctacaagctagtaccagttgagccagataaggtagaagaggccaataaaggagagaacaccagcttgttacaccctgtgagcctgcatggaatggatgaccctgagagagaagtgttagagtggaggtttgacagccgcctagcatttcatcacgtggcccgagagctgcatccggagtacttcaagaactgctgacatcgagcttgctacaagggactttccgctggggactttccagggaggcgtggcctgggcgggactggggagtggcgagccctcagatgctgcatataagcagctgctttttgcctgtactgggtctctctggttagaccagatctgagcctgggagctctctggctaactagggaacccactgcttaagcctcaataaagcttgccttgagtgcttcaagtagtgtgtgcccgtctgttgtgtgactctggtaactagagatccctcagacccttttagtcagtgtggaaaatctctagca

SEQ ID NO: 108 - DNA, 7988 bp, Artificial Sequence
  Synthetic Sequence
tggaagggctaatttggtcccaaaaaagacaagagatccttgatctgtggatctaccacacacaaggctacttccctgattggcagaactacacaccagggccagggatcagatatccactgacctttggatggtgcttcaagttagtaccagttgaaccagagcaagtagaagaggccaatgaaggagagaacaacagcttgttacaccctatgagccagcatgggatggaggacccggagggagaagtattagtgtggaagtttgacagcctcctagcatttcgtcacatggcccgagagctgcatccggagtactacaaagactgctgacatcgagctttctacaagggactttccgctggggactttccagggaggtgtggcctgggcgggactggggagtggcgagccctcagatgctacatataagcagctgctttttgcctgtactgggtctctctggttagaccagatctgagcctgggagctctctggctaactagggaacccactgcttaagcctcaataaagcttgccttgagtgctcaaagtagtgtgtgcccgtctgttgtgtgactctggtaactagagatccctcagacccttttagtcagtgtggaaaatctctagcagtggcgcccgaacagggacttgaaagcgaaagtaaagccagaggagatctctcgacgcaggactcggcttgctgaagcgcgcacggcaagaggcgaggggcggcgactggtgagtacgccaaaaattttgactagcggaggctagaaggagagagatgggtgcgagagcgtcggtattaagcgggggagaattagataaatgggaaaaaattcggttaaggccagggggaaagaaacaatataaactaaaacatatagtatgggcaagcagggagctagaacgattcgcagttaatcctggccttttagagacatcagaaggctgtagacaaatactgggacagctacaaccatcccttcagacaggatcagaagaacttagatcattatataatacaatagcagtcctctattgtgtgcatcaaaggatagatgtaaaagacaccaaggaagccttagataagatagaggaagagcaaaacaaaagtaagaaaaaggcacagcaagcagcagctgacacaggaaacaacagccaggtcagccaaaattaccctatagtgcagaacctccaggggcaaatggtacatcaggccatatcacctagaactttaaatgcatgggtaaaagtagtagaagagaaggctttcagcccagaagtaatacccatgttttcagcattatcagaaggagccaccccacaagatttaaataccatgctaaacacagtggggggacatcaagcagccatgcaaatgttaaaagagaccatcaatgaggaagctgcagaatgggatagattgcatccagtgcatgcagggcctattgcaccaggccaaccgtccatgaagggttcgatgagctgcagggcatgttatatatggcaacggcagattcgttcaggagcagatgatacagtattagaagaaatgaatttgccaggaagatggaaaccaaaaatgatagggggaattggaggttttatcaaagtaagacagtatgatcagatactcatagaaatctgcggacataaagctataggtacagtattagtaggacctacacctgtcaacataattggaagaaatctgttgactcagattggctgcactttaaattttcccattagtcctattgagactgtaccagtaaaattaaagccaggaatggatggcccaaaagttaaacaatggccattgacagaagaaaaaataaaagcattagtagaaatttgtacagaaatggaaaaggaaggaaaaatttcaaaaattgggcctgaaaatccatacaatactccagtatttgccataaagaaaaaagacagtactaaatggagaaaattagtagatttcagagaacttaataagagaactcaagatttctgggaagttcaattaggaataccacatcctgcagggttaaaacagaaaaaatcagtaacagtactggatgtgggcgatgcatatttttcagttcccttagataaagacttcaggaagtatactgcatttaccatacctagtataaacaatgagacaccagggattagatatcagtacaatgtgcttccacagggatggaaaggatcaccagcaatattccagtgtagcatgacaaaaatcttagagccttttagaaaacaaaatccagacatagtcatctatcaatacatggatgatttgtatgtaggatctgacttagaaatagggcagcatagaacaaaaatagaggaactgagacaacatctgttgaggtggggatttaccacaccagacaaaaaacatcagaaagaacctccattcctttggatgggttatgaactccatcctgataaatggacagtacagcctatagtgctgccagaaaaggacagctggactgtcaatgacatacagaaattagtgggaaaattgaattgggcaagtcagatttatgcagggattaaagtaaggcaattatgtaaacttcttaggggaaccaaagcactaacagaagtagtaccactaacagaagaagcagagctagaactggcagaaaacagggagattctaaaagaaccggtacatggagtgtattatgacccatcaaaagacttaatagcagaaatacagaagcaggggcaaggccaatggacatatcaaatttatcaagagccatttaaaaatctgaaaacaggaaagtatgcaagaatgaacgaatctgccgttgccatatacagcatctgaacaagctgatcgaacccttcatggacggttaaggccgcctgttggtgggcggggatcaagcaggaatttggcattccctacaatccccaaagtcaaggagtaatagaatctatgaataaagaattaaagaaaattataggacaggtaagagatcaggctgaacatcttaagacagcagtacaaatggcagtattcatccacaattttaaaagaaaaggggggattggggggtacagtgcaggggaaagaatagtagacataatagcaacagacatacaaactaaagaattacaaaaacaaattacaaaaattcaaaattttcgggtttattacagggacagcagagatccagtttggaaaggaccagcaaagctcctctggaaaggtgaaggggcagtagtaatacaagataatagtgacataaaagtagtgccaagaagaaaagcaaagatcatcagggattatggaaaacagatggcaggtgatgattgtgtggcaagtagacaggatgaggattaacacatggaaaagattagtaaaacaccatatgtatatttcaaggaaagctaaggactggttttatagacatcactatgaaagtactaatccaaaaataagttcagaagtacacatcccactaggggatgctaaattagtaataacaacatattggggtctgcatacaggagaaagagactggcatttgggtcagggagtctccatagaatggaggaaaaagagatatagcacacaagtagaccctgacctagcagaccaactaattcatctgcactattttgattgtttttcagaatctgctataagaaataccatattaggacgtatagttagtcctaggtgtgaatatcaagcaggacataacaaggtaggatctctacagtacttggcactagcagcattaataaaaccaaaacagataaagccacctttgcctagtgttaggaaactgacagaggacagatggaacaagccccagaagaccaagggccacagagggagccatacaatgaatggacactagagcttttagaggaacttaagagtgaagctgttagacattttcctaggatatggctccataacttaggacaacatatctatgaaacttacggggatacttgggcaggagtggaagccataataagaattctgcaacaactgctgtttatccatttcagaattgggtgtcgacatagcagaataggcgttactcgacagaggagagcaagaaatggagccagtagatcctagactagagccctggaagcatccaggaagtcagcctaaaactgcttgtaccaattgctattgtaaaaagtgttgctttcattgccaagtttgtttcatgacaaaagccttaggcatctcctatggcaggaagaagcggagacagcgacgaagagctcatcagaacagtcagactcatcaagcttctctatcaaagcagtaagtagtacatgtaatgcaacctataatagtagcaatagtagcattagtagtagcaataataatagcaatagttgtgtggtccatagtaatcatagaatataggaaaatattaagacaaagaaaaatagacaggttaattgatagactaatagaaagagcagaagacagtggcaatgagagtgaaggagaagtatcagcacttgtggagatgggggtggaaatggggcaccatgctccttgggatattgatgatctgtagtgctacagaaaaattgtgggtcacagtctattatggggtacctgtgtggaaggaagcaaccaccactctattttgtgcatcagatgctaaagcatatgatacagaggtacataatgtttgggccacacatgcctgtgtacccacagaccccaacccacaagaagtagtattggtaaatgtgacagaaaattttaacatgtggaaaaatgacatggtagaacagatgcatgaggatataatcagtttatgggatcaaagcctaaagccatgtgtaaaattaaccccactctgtgttagtttaaagtgcactgatttgaagaatgatactaataccaatagtagtagcgggagaatgataatggagaaaggagagataaaaaactgctctttcaatatcagcacaagcataagagataaggtgcagaaagaatatgcattcttttataaacttgatatagtaccaatagataataccagctataggttgataagttgtaacacctcagtcattacacaggcctgtccaaaggtatcctttgagccaattcccatacattattgtgccccggctggttttgcgattctaaaatgtaataataagacgttcaatggaacaggaccatgtacaaatgtcagcacagtacaatgtacacatggaatcaggccagtagtatcaactcaactgctgttaaatggcagtctagcagaagaagatgtagtaattagatctgccaatttcacagacaatgctaaaaccataatagtacagctgaacacatctgtagaaattaattgtacaagacccaacaacaatacaagaaaaagtatccgtatccagaggggaccagggagagcatttgttacaataggaaaaataggaaatatgagacaagcacattgtaacattagtagagcaaaatggaatgccactttaaaacagatagctagcaaattaagagaacaatttggaaataataaaacaataatctttaagcaatcctcaggaggggacccagaaattgtaacgcacagttttaattgtggaggggaatttttctactgtaattcaacacaactgtttaatagtacttggtttaatagtacttggagtactgaagggtcaaataacactgaaggaagtgacacaatcacactcccatgcagaataaaacaatttataaacatgtggcaggaagtaggaaaagcaatgtatgcccctcccatcagtggacaaattagatgttcatcaaatattactgggctgctattaacaagagatggtggtaataacaacaatgggtccgagatcttcagacctggaggaggcgatatgagggacaattggagaagtgaattatataaatataaagtagtaaaaattgaaccattaggagtagcacccaccaaggcaaagagaagagtggtgcagagagaaaaaagagcagtgggaataggagctttgttccttgggttcttgggagcagcaggaagcactatgggcgcagcgtcaatgacgctgacggtacaggccagacaattattgtctgatatagtgcagcagcagaacaatttgctgagggctattgaggcgcaacagcatctgttgcaactcacagtctggggcatcaaacagctccaggcaagaatcctggctgtggaaagatacctaaaggatcaacagctcctggggatttggggttgctctggaaaactcatttgcaccactgctgtgccttggaatgctagttggagtaataaatctctggaacagatttggaataacatgacctggatggagtgggacagagaaattaacaattacacaagcttaatacactccttaattgaagaatcgcaaaaccagcaagaaaagaatgaacaagaattattggaattagataaatgggcaagtttgtggaattggtttaacataacaaattggctgtggtatataaaattattcataatgatagtaggaggcttggtaggtttaagaatagtttttgctgtactttctatagtgaatagagttaggcagggatattcaccattatcgtttcagacccacctcccaatcccgaggggacccgacaggcccgaaggaatagaagaagaaggtggagagagagacagagacagatccattcgattagtgaacggatccttagcacttatctgggacgatctgcggagcctgtgcctcttcagctaccaccgcttgagagacttactcttgattgtaacgaggattgtggaacttctgggacgcagggggtgggaagccctcaaatattggtggaatctcctacagtattggagtcaggaactaaagaatagtgctgttaacttgctcaatgccacagccatagcagtagctgaggggacagatagggttatagaagtattacaagcagcttatagagctattcgccacatacctagaagaataagacagggcttggaaaggattttgctataagatgggtggcaagtggtcaaaaagtagtgtgattggatggcctgctgtaagggaaagaatgagacgagctgagccagcagcagatggggtgggagcagtatctcgagacctagaaaaacatggagcaatcacaagtagcaatacagcagctaacaatgctgcttgtgcctggctagaagcacaagaggaggaagaggtgggttttccagtcacacctcaggtacctttaagaccaatgacttacaaggcagctgtagatcttagccactttttaaaagaaaaggggggactggaagggctaattcactcccaaagaagacaagatatccttgatctgtggatctaccacacacaaggctacttccctgattggcagaactacacaccagggccaggggtcagatatccactgacctttggatggtgctacaagctagtaccagttgagccagataaggtagaagaggccaataaaggagagaacaccagcttgttacaccctgtgagcctgcatggaatggatgaccctgagagagaagtgttagagtggaggtttgacagccgcctagcatttcatcacgtggcccgagagctgcatccggagtacttcaagaactgctgacatcgagcttgctacaagggactttccgctggggactttccagggaggcgtggcctgggcgggactggggagtggcgagccctcagatgctgcatataagcagctgctttttgcctgtactgggtctctctggttagaccagatctgagcctgggagctctctggctaactagggaacccactgcttaagcctcaataaagcttgccttgagtgcttcaagtagtgtgtgcccgtctgttgtgtgactctggtaactagagatccctcagacccttttagtcagtgtggaaaatctctagca

SEQ ID NO: 109 - DNA, 7065 bp, Artificial Sequence
  Synthetic Sequence
tggaagggctaatttggtcccaaaaaagacaagagatccttgatctgtggatctaccacacacaaggctacttccctgattggcagaactacacaccagggccagggatcagatatccactgacctttggatggtgcttcaagttagtaccagttgaaccagagcaagtagaagaggccaatgaaggagagaacaacagcttgttacaccctatgagccagcatgggatggaggacccggagggagaagtattagtgtggaagtttgacagcctcctagcatttcgtcacatggcccgagagctgcatccggagtactacaaagactgctgacatcgagctttctacaagggactttccgctggggactttccagggaggtgtggcctgggcgggactggggagtggcgagccctcagatgctacatataagcagctgctttttgcctgtactgggtctctctggttagaccagatctgagcctgggagctctctggctaactagggaacccactgcttaagcctcaataaagcttgccttgagtgctcaaagtagtgtgtgcccgtctgttgtgtgactctggtaactagagatccctcagacccttttagtcagtgtggaaaatctctagcagtggcgcccgaacagggacttgaaagcgaaagtaaagccagaggagatctctcgacgcaggactcggcttgctgaagcgcgcacggcaagaggcgaggggcggcgactggtgagtacgccaaaaattttgactagcggaggctagaaggagagagatgggtgcgagagcgtcggtattaagcgggggagaattagataaatgggaaaaaattcggttaaggccagggggaaagaaacaatataaactaaaacatatagtatgggcaagcagggagctagaacgattcgcagttaatcctggccttttagagacatcagaaggctgtagacaaatactgggacagctacaaccatcccttcagacaggatcagaagaacttagatcattatataatacaatagcagtcctctattgtgtgcatcaaaggatagatgtaaaagacaccaaggaagccttagataagatagaggaagagcaaaacaaaagtaagaaaaaggcacagcaagcagcagctgacacaggaaacaacagccaggtcagccaaaattaccctatagtgcagaacctccaggggcaaatggtacatcaggccatatcacctagaactttaaatgcatgggtaaaagtagtagaagagaaggctttcagcccagaagtaatacccatgttttcagcattatcagaaggagccaccccacaagatttaaataccatgctaaacacagtggggggacatcaagcagccatgcaaatgttaaaagagaccatcaatgaggaagctgcagaatgggatagattgcatccagtgcatgcagggcctattgcaccaggccaaccgtccatgaagggttcgatgagctgcagggcatgttatatatggcaacggcagattcgttcaggagcagatgatacagtattagaagaaatgaatttgccaggaagatggaaaccaaaaatgatagggggaattggaggttttatcaaagtaagacagtatgatcagatactcatagaaatctgcggacataaagctataggtacagtattagtaggacctacacctgtcaacataattggaagaaatctgttgactcagattggctgcactttaaattttcccattagtcctattgagactgtaccagtaaaattaaagccaggaatggatggcccaaaagttaaacaatggccattgacagaagaaaaaataaaagcattagtagaaatttgtacagaaatggaaaaggaaggaaaaatttcaaaaattgggcctgaaaatccatacaatactccagtatttgccataaagaaaaaagacagtactaaatggagaaaattagtagatttcagagaacttaataagagaactcaagatttctgggaagttcaattaggaataccacatcctgcagggttaaaacagaaaaaatcagtaacagtactggatgtgggcgatgcatatttttcagttcccttagataaagacttcaggaagtatactgcatttaccatacctagtataaacaatgagacaccagggattagatatcagtacaatgtgcttccacagggatggaaaggatcaccagcaatattccagtgtagcatgacaaaaatcttagagccttttagaaaacaaaatccagacatagtcatctatcaatacatggatgatttgtatgtaggatctgacttagaaatagggcagcatagaacaaaaatagaggaactgagacaacatctgttgaggtggggatttaccacaccagacaaaaaacatcagaaagaacctccattcctttggatgggttatgaactccatcctgataaatggacagtacagcctatagtgctgccagaaaaggacagctggactgtcaatgacatacagaaattagtgggaaaattgaattgggcaagtcagatttatgcagggattaaagtaaggcaattatgtaaacttcttaggggaaccaaagcactaacagaagtagtaccactaacagaagaagcagagctagaactggcagaaaacagggagattctaaaagaaccggtacatggagtgtattatgacccatcaaaagacttaatagcagaaatacagaagcaggggcaaggccaatggacatatcaaatttatcaagagccatttaaaaatctgaaaacaggaaagtatgcaagaatgaacgaatctgccgttgccatatacagcatctgaacaagctgatcgaacccttcatggacggttaaggccgcctgttggtgggcggggatcaagcaggaatttggcattccctacaatccccaaagtcaaggagtaatagaatctatgaataaagaattaaagaaaattataggacaggtaagagatcaggctgaacatcttaagacagcagtacaaatggcagtattcatccacaattttaaaagaaaaggggggattggggggtacagtgcaggggaaagaatagtagacataatagcaacagacatacaaactaaagaattacaaaaacaaattacaaaaattcaaaattttcgggtttattacagggacagcagagatccagtttggaaaggaccagcaaagctcctctggaaaggtgaaggggcagtagtaatacaagataatagtgacataaaagtagtgccaagaagaaaagcaaagatcatcagggattatggaaaacagatggcaggtgatgattgtgtggcccgtccatgaagggttcgattcttgaacagcgcggtctgttatggcaacggcagattcgtttaatgcaacctataatagtagcaatagtagcattagtagtagcaataataatagcaatagttgtgtggtccatagtaatcatagaatataggaaaatattaagacaaagaaaaatagacaggttaattgatagactaatagaaagagcagaagacagtggcaatgagagtgaaggagaagtatcagcacttgtggagatgggggtggaaatggggcaccatgctccttgggatattgatgatctgtagtgctacagaaaaattgtgggtcacagtctattatggggtacctgtgtggaaggaagcaaccaccactctattttgtgcatcagatgctaaagcatatgatacagaggtacataatgtttgggccacacatgcctgtgtacccacagaccccaacccacaagaagtagtattggtaaatgtgacagaaaattttaacatgtggaaaaatgacatggtagaacagatgcatgaggatataatcagtttatgggatcaaagcctaaagccatgtgtaaaattaaccccactctgtgttagtttaaagtgcactgatttgaagaatgatactaataccaatagtagtagcgggagaatgataatggagaaaggagagataaaaaactgctctttcaatatcagcacaagcataagagataaggtgcagaaagaatatgcattcttttataaacttgatatagtaccaatagataataccagctataggttgataagttgtaacacctcagtcattacacaggcctgtccaaaggtatcctttgagccaattcccatacattattgtgccccggctggttttgcgattctaaaatgtaataataagacgttcaatggaacaggaccatgtacaaatgtcagcacagtacaatgtacacatggaatcaggccagtagtatcaactcaactgctgttaaatggcagtctagcagaagaagatgtagtaattagatctgccaatttcacagacaatgctaaaaccataatagtacagctgaacacatctgtagaaattaattgtacaagacccaacaacaatacaagaaaaagtatccgtatccagaggggaccagggagagcatttgttacaataggaaaaataggaaatatgagacaagcacattgtaacattagtagagcaaaatggaatgccactttaaaacagatagctagcaaattaagagaacaatttggaaataataaaacaataatctttaagcaatcctcaggaggggacccagaaattgtaacgcacagttttaattgtggaggggaatttttctactgtaattcaacacaactgtttaatagtacttggtttaatagtacttggagtactgaagggtcaaataacactgaaggaagtgacacaatcacactcccatgcagaataaaacaatttataaacatgtggcaggaagtaggaaaagcaatgtatgcccctcccatcagtggacaaattagatgttcatcaaatattactgggctgctattaacaagagatggtggtaataacaacaatgggtccgagatcttcagacctggaggaggcgatatgagggacaattggagaagtgaattatataaatataaagtagtaaaaattgaaccattaggagtagcacccaccaaggcaaagagaagagtggtgcagagagaaaaaagagcagtgggaataggagctttgttccttgggttcttgggagcagcaggaagcactatgggcgcagcgtcaatgacgctgacggtacaggccagacaattattgtctgatatagtgcagcagcagaacaatttgctgagggctattgaggcgcaacagcatctgttgcaactcacagtctggggcatcaaacagctccaggcaagaatcctggctgtggaaagatacctaaaggatcaacagctcctggggatttggggttgctctggaaaactcatttgcaccactgctgtgccttggaatgctagttggagtaataaatctctggaacagatttggaataacatgacctggatggagtgggacagagaaattaacaattacacaagcttaatacactccttaattgaagaatcgcaaaaccagcaagaaaagaatgaacaagaattattggaattagataaatgggcaagtttgtggaattggtttaacataacaaattggctgtggtatataaaattattcataatgatagtaggaggcttggtaggtttaagaatagtttttgctgtactttctatagtgaatagagttaggcagggatattcaccattatcgtttcagacccacctcccaatcccgaggggacccgacaggcccgaaggaatagaagaagaaggtggagagagagacagagacagatccattcgattagtgaacggatccttagcacttatctgggacgatctgcggagcctgtgcctcttcagctaccaccgcttgagagacttactcttgattgtaacgaggattgtggaacttctgggacgcagggggtgggaagccctcaaatattggtggaatctcctacagtattggagtcaggaactaaagaatagtgctgttaacttgctcaatgccacagccatagcagtagctgaggggacagatagggttatagaagtattacaagcagcttatagagctattcgccacatacctagaagaataagacagggcttggaaaggattttgctataagatgggtggcaagtggtcaaaaagtagtgtgattggatggcctgctgtaagggaaagaatgagacgagctgagccagcagcagatggggtgggagcagtatctcgagacctagaaaaacatggagcaatcacaagtagcaatacagcagctaacaatgctgcttgtgcctggctagaagcacaagaggaggaagaggtgggttttccagtcacacctcaggtacctttaagaccaatgacttacaaggcagctgtagatcttagccactttttaaaagaaaaggggggactggaagggctaattcactcccaaagaagacaagatatccttgatctgtggatctaccacacacaaggctacttccctgattggcagaactacacaccagggccaggggtcagatatccactgacctttggatggtgctacaagctagtaccagttgagccagataaggtagaagaggccaataaaggagagaacaccagcttgttacaccctgtgagcctgcatggaatggatgaccctgagagagaagtgttagagtggaggtttgacagccgcctagcatttcatcacgtggcccgagagctgcatccggagtacttcaagaactgctgacatcgagcttgctacaagggactttccgctggggactttccagggaggcgtggcctgggcgggactggggagtggcgagccctcagatgctgcatataagcagctgctttttgcctgtactgggtctctctggttagaccagatctgagcctgggagctctctggctaactagggaacccactgcttaagcctcaataaagcttgccttgagtgcttcaagtagtgtgtgcccgtctgttgtgtgactctggtaactagagatccctcagacccttttagtcagtgtggaaaatctctagca

SEQ ID NO: 110 - DNA, 6840 bp, Artificial Sequence
  Synthetic Sequence
tggaagggctaatttggtcccaaaaaagacaagagatccttgatctgtggatctaccacacacaaggctacttccctgattggcagaactacacaccagggccagggatcagatatccactgacctttggatggtgcttcaagttagtaccagttgaaccagagcaagtagaagaggccaatgaaggagagaacaacagcttgttacaccctatgagccagcatgggatggaggacccggagggagaagtattagtgtggaagtttgacagcctcctagcatttcgtcacatggcccgagagctgcatccggagtactacaaagactgctgacatcgagctttctacaagggactttccgctggggactttccagggaggtgtggcctgggcgggactggggagtggcgagccctcagatgctacatataagcagctgctttttgcctgtactgggtctctctggttagaccagatctgagcctgggagctctctggctaactagggaacccactgcttaagcctcaataaagcttgccttgagtgctcaaagtagtgtgtgcccgtctgttgtgtgactctggtaactagagatccctcagacccttttagtcagtgtggaaaatctctagcagtggcgcccgaacagggacttgaaagcgaaagtaaagccagaggagatctctcgacgcaggactcggcttgctgaagcgcgcacggcaagaggcgaggggcggcgactggtgagtacgccaaaaattttgactagcggaggctagaaggagagagatgggtgcgagagcgtcggtattaagcgggggagaattagataaatgggaaaaaattcggttaaggccagggggaaagaaacaatataaactaaaacatatagtatgggcaagcagggagctagaacgattcgcagttaatcctggccttttagagacatcagaaggctgtagacaaatactgggacagctacaaccatcccttcagacaggatcagaagaacttagatcattatataatacaatagcagtcctctattgtgtgcatcaaaggatagatgtaaaagacaccaaggaagccttagataagatagaggaagagcaaaacaaaagtaagaaaaaggcacagcaagcagcagctgacacaggaaacaacagccaggtcagccaaaattaccctatagtgcagaacctccaggggcaaatggtacatcaggccatatcacctagaactttaaatgcatgggtaaaagtagtagaagagaaggctttcagcccagaagtaatacccatgttttcagcattatcagaaggagccaccccacaagatttaaataccatgctaaacacagtggggggacatcaagcagccatgcaaatgttaaaagagaccatcaatgaggaagctgcagaatgggatagattgcatccagtgcatgcagggcctattgcaccaggccaaccgtccatgaagggttcgatgagctgcagggcatgttatatatggcaacggcagattcgttcaggagcagatgatacagtattagaagaaatgaatttgccaggaagatggaaaccaaaaatgatagggggaattggaggttttatcaaagtaagacagtatgatcagatactcatagaaatctgcggacataaagctataggtacagtattagtaggacctacacctgtcaacataattggaagaaatctgttgactcagattggctgcactttaaattttcccattagtcctattgagactgtaccagtaaaattaaagccaggaatggatggcccaaaagttaaacaatggccattgacagaagaaaaaataaaagcattagtagaaatttgtacagaaatggaaaaggaaggaaaaatttcaaaaattgggcctgaaaatccatacaatactccagtatttgccataaagaaaaaagacagtactaaatggagaaaattagtagatttcagagaacttaataagagaactcaagatttctgggaagttcaattaggaataccacatcctgcagggttaaaacagaaaaaatcagtaacagtactggatgtgggcgatgcatatttttcagttcccttagataaagacttcaggaagtatactgcatttaccatacctagtataaacaatgagacaccagggattagatatcagtacaatgtgcttccacagggatggaaaggatcaccagcaatattccagtgtagcatgacaaaaatcttagagccttttagaaaacaaaatccagacatagtcatctatcaatacatggatgatttgtatgtaggatctgacttagaaatagggcagcatagaacaaaaatagaggaactgagacaacatctgttgaggtggggatttaccacaccagacaaaaaacatcagaaagaacctccattcctttggatgggttatgaactccatcctgataaatggacagtacagcctatagtgctgccagaaaaggacagctggactgtcaatgacatacagaaattagtgggaaaattgaattgggcaagtcagatttatgcagggattaaagtaaggcaattatgtaaacttcttaggggaaccaaagcactaacagaagtagtaccactaacagaagaagcagagctagaactggcagaaaacagggagattctaaaagaaccggtacatggagtgtattatgacccatcaaaagacttaatagcagaaatacagaagcaggggcaaggccaatggacatatcaaatttatcaagagccatttaaaaatctgaaaacaggaaagtatgcaagaatgaacgaatctgccgttgccatatacagcatctgaacaagctgatcgaacccttcatggacggttaaggccgcctgttggtgggcggggatcaagcaggaatttggcattccctacaatccccaaagtcaaggagtaatagaatctatgaataaagaattaaagaaaattataggacaggtaagagatcaggctgaacatcttaagacagcagtacaaatggcagtattcatccacaattttaaaagaaaaggggggattggggggtacagtgcaggggaaagaatagtagacataatagcaacagacatacaaactaaagaattacaaaaacaaattacaaaaattcaaaattttcgggtttattacagggacagcagagatccagtttggaaaggaccagcaaagctcctctggaaaggtgaaggggcagtagtaatacaagataatagtgacataaaagtagtgccaagaagaaaagcaaagatcatcagggattaaccgtccatgaagggttcgattatctgtagccaacattcgatatggcaacggcagattcgttggagatgggggtggaaatggggcaccatgctccttgggatattgatgatctgtagtgctacagaaaaattgtgggtcacagtctattatggggtacctgtgtggaaggaagcaaccaccactctattttgtgcatcagatgctaaagcatatgatacagaggtacataatgtttgggccacacatgcctgtgtacccacagaccccaacccacaagaagtagtattggtaaatgtgacagaaaattttaacatgtggaaaaatgacatggtagaacagatgcatgaggatataatcagtttatgggatcaaagcctaaagccatgtgtaaaattaaccccactctgtgttagtttaaagtgcactgatttgaagaatgatactaataccaatagtagtagcgggagaatgataatggagaaaggagagataaaaaactgctctttcaatatcagcacaagcataagagataaggtgcagaaagaatatgcattcttttataaacttgatatagtaccaatagataataccagctataggttgataagttgtaacacctcagtcattacacaggcctgtccaaaggtatcctttgagccaattcccatacattattgtgccccggctggttttgcgattctaaaatgtaataataagacgttcaatggaacaggaccatgtacaaatgtcagcacagtacaatgtacacatggaatcaggccagtagtatcaactcaactgctgttaaatggcagtctagcagaagaagatgtagtaattagatctgccaatttcacagacaatgctaaaaccataatagtacagctgaacacatctgtagaaattaattgtacaagacccaacaacaatacaagaaaaagtatccgtatccagaggggaccagggagagcatttgttacaataggaaaaataggaaatatgagacaagcacattgtaacattagtagagcaaaatggaatgccactttaaaacagatagctagcaaattaagagaacaatttggaaataataaaacaataatctttaagcaatcctcaggaggggacccagaaattgtaacgcacagttttaattgtggaggggaatttttctactgtaattcaacacaactgtttaatagtacttggtttaatagtacttggagtactgaagggtcaaataacactgaaggaagtgacacaatcacactcccatgcagaataaaacaatttataaacatgtggcaggaagtaggaaaagcaatgtatgcccctcccatcagtggacaaattagatgttcatcaaatattactgggctgctattaacaagagatggtggtaataacaacaatgggtccgagatcttcagacctggaggaggcgatatgagggacaattggagaagtgaattatataaatataaagtagtaaaaattgaaccattaggagtagcacccaccaaggcaaagagaagagtggtgcagagagaaaaaagagcagtgggaataggagctttgttccttgggttcttgggagcagcaggaagcactatgggcgcagcgtcaatgacgctgacggtacaggccagacaattattgtctgatatagtgcagcagcagaacaatttgctgagggctattgaggcgcaacagcatctgttgcaactcacagtctggggcatcaaacagctccaggcaagaatcctggctgtggaaagatacctaaaggatcaacagctcctggggatttggggttgctctggaaaactcatttgcaccactgctgtgccttggaatgctagttggagtaataaatctctggaacagatttggaataacatgacctggatggagtgggacagagaaattaacaattacacaagcttaatacactccttaattgaagaatcgcaaaaccagcaagaaaagaatgaacaagaattattggaattagataaatgggcaagtttgtggaattggtttaacataacaaattggctgtggtatataaaattattcataatgatagtaggaggcttggtaggtttaagaatagtttttgctgtactttctatagtgaatagagttaggcagggatattcaccattatcgtttcagacccacctcccaatcccgaggggacccgacaggcccgaaggaatagaagaagaaggtggagagagagacagagacagatccattcgattagtgaacggatccttagcacttatctgggacgatctgcggagcctgtgcctcttcagctaccaccgcttgagagacttactcttgattgtaacgaggattgtggaacttctgggacgcagggggtgggaagccctcaaatattggtggaatctcctacagtattggagtcaggaactaaagaatagtgctgttaacttgctcaatgccacagccatagcagtagctgaggggacagatagggttatagaagtattacaagcagcttatagagctattcgccacatacctagaagaataagacagggcttggaaaggattttgctataagatgggtggcaagtggtcaaaaagtagtgtgattggatggcctgctgtaagggaaagaatgagacgagctgagccagcagcagatggggtgggagcagtatctcgagacctagaaaaacatggagcaatcacaagtagcaatacagcagctaacaatgctgcttgtgcctggctagaagcacaagaggaggaagaggtgggttttccagtcacacctcaggtacctttaagaccaatgacttacaaggcagctgtagatcttagccactttttaaaagaaaaggggggactggaagggctaattcactcccaaagaagacaagatatccttgatctgtggatctaccacacacaaggctacttccctgattggcagaactacacaccagggccaggggtcagatatccactgacctttggatggtgctacaagctagtaccagttgagccagataaggtagaagaggccaataaaggagagaacaccagcttgttacaccctgtgagcctgcatggaatggatgaccctgagagagaagtgttagagtggaggtttgacagccgcctagcatttcatcacgtggcccgagagctgcatccggagtacttcaagaactgctgacatcgagcttgctacaagggactttccgctggggactttccagggaggcgtggcctgggcgggactggggagtggcgagccctcagatgctgcatataagcagctgctttttgcctgtactgggtctctctggttagaccagatctgagcctgggagctctctggctaactagggaacccactgcttaagcctcaataaagcttgccttgagtgcttcaagtagtgtgtgcccgtctgttgtgtgactctggtaactagagatccctcagacccttttagtcagtgtggaaaatctctagca

SEQ ID NO: 111 - DNA, 8976 bp, Artificial Sequence
  Synthetic Sequence
tggaagggctaatttggtcccaaaaaagacaagagatccttgatctgtggatctaccacacacaaggctacttccctgattggcagaactacacaccagggccagggatcagatatccactgacctttggatggtgcttcaagttagtaccagttgaaccagagcaagtagaagaggccaatgaaggagagaacaacagcttgttacaccctatgagccagcatgggatggaggacccggagggagaagtattagtgtggaagtttgacagcctcctagcatttcgtcacatggcccgagagctgcatccggagtactacaaagactgctgacatcgagctttctacaagggactttccgctggggactttccagggaggtgtggcctgggcgggactggggagtggcgagccctcagatgctacatataagcagctgctttttgcctgtactgggtctctctggttagaccagatctgagcctgggagctctctggctaactagggaacccactgcttaagcctcaataaagcttgccttgagtgctcaaagtagtgtgtgcccgtctgttgtgtgactctggtaactagagatccctcagacccttttagtcagtgtggaaaatctctagcagtggcgcccgaacagggacttgaaagcgaaagtaaagccagaggagatctctcgacgcaggactcggcttgctgaagcgcgcacggcaagaggcgaggggcggcgactggtgagtacgccaaaaattttgactagcggaggctagaaggagagagatgggtgcgagagcgtcggtattaagcgggggagaattagataaatgggaaaaaattcggttaaggccagggggaaagaaacaatataaactaaaacatatagtatgggcaagcagggagctagaacgattcgcagttaatcctggccttttagagacatcagaaggctgtagacaaatactgggacagctacaaccatcccttcagacaggatcagaagaacttagatcattatataatacaatagcagtcctctattgtgtgcatcaaaggatagatgtaaaagacaccaaggaagccttagataagatagaggaagagcaaaacaaaagtaagaaaaaggcacagcaagcagcagctgacacaggaaacaacagccaggtcagccaaaattaccctatagtgcagaacctccaggggcaaatggtacatcaggccatatcacctagaactttaaatgcatgggtaaaagtagtagaagagaaggctttcagcccagaagtaatacccatgttttcagcattatcagaaggagccaccccacaagatttaaataccatgctaaacacagtggggggacatcaagcagccatgcaaatgttaaaagagaccatcaatgaggaagctgcagaatgggatagattgcatccagtgcatgcagggcctattgcaccaggccagatgagagaaccaaggggaagtgacatagcaggaactactagtacccttcaggaacaaataggatggatgacacataatccacctatcccaaccgtccatgaagggttcgatggcgaccctcggccgtggactatggcaacggcagattcgttaaatgaatttgccaggaagatggaaaccaaaaatgatagggggaattggaggttttatcaaagtaagacagtatgatcagatactcatagaaatctgcggacataaagctataggtacagtattagtaggacctacacctgtcaacataattggaagaaatctgttgactcagattggctgcactttaaattttcccattagtcctattgagactgtaccagtaaaattaaagccaggaatggatggcccaaaagttaaacaatggccattgacagaagaaaaaataaaagcattagtagaaatttgtacagaaatggaaaaggaaggaaaaatttcaaaaattgggcctgaaaatccatacaatactccagtatttgccataaagaaaaaagacagtactaaatggagaaaattagtagatttcagagaacttaataagagaactcaagatttctgggaagttcaattaggaataccacatcctgcagggttaaaacagaaaaaatcagtaacagtactggatgtgggcgatgcatatttttcagttcccttagataaagacttcaggaagtatactgcatttaccatacctagtataaacaatgagacaccagggattagatatcagtacaatgtgcttccacagggatggaaaggatcaccagcaatattccagtgtagcatgacaaaaatcttagagccttttagaaaacaaaatccagacatagtcatctatcaatacatggatgatttgtatgtaggatctgacttagaaatagggcagcatagaacaaaaatagaggaactgagacaacatctgttgaggtggggatttaccacaccagacaaaaaacatcagaaagaacctccattcctttggatgggttatgaactccatcctgataaatggacagtacagcctatagtgctgccagaaaaggacagctggactgtcaatgacatacagaaattagtgggaaaattgaattgggcaagtcagatttatgcagggattaaagtaaggcaattatgtaaacttcttaggggaaccaaagcactaacagaagtagtaccactaacagaagaagcagagctagaactggcagaaaacagggagattctaaaagaaccggtacatggagtgtattatgacccatcaaaagacttaatagcagaaatacagaagcaggggcaaggccaatggacatatcaaatttatcaagagccatttaaaaatctgaaaacaggaaagtatgcaagaatgaagggtgcccacactaatgatgtgaaacaattaacagaggcagtacaaaaaatagccacagaaagcatagtaatatggggaaagactcctaaatttaaattacccatacaaaaggaaacatgggaagcatggtggacagagtattggcaagccacctggattcctgagtgggagtttgtcaatacccctcccttagtgaagttatggtaccagttagagaaagaacccataataggagcagaaactttctatgtagatggggcagccaatagggaaactaaattaggaaaagcaggatatgtaactgacagaggaagacaaaaagttgtccccctaacggacacaacaaatcagaagactgagttacaagcaattcatctagctttgcaggattcgggattagaagtaaacatagtgacagactcacaatatgcattgggaatcattcaagcacaaccagataagagtgaatcagagttagtcagtcaaataatagagcagttaataaaaaaggaaaaagtctacctggcatgggtaccagcacacaaaggaattggaggaaatgaacaagtagataaattggtcagtgctggaatcaggaaagtactatttttagatggaatagataaggcccaagaagaacatgagaaatatcacagtaattggagagcaatggctagtgattttaacctaccacctgtagtagcaaaagaaatagtagccagctgtgataaatgtcagctaaaaggggaagccatgcatggacaagtagactgtagcccaggaatatggcagctagattgtacacatttagaaggaaaagttatcttggtagcagttcatgtagccagtggatatatagaagcagaagtaattccagcagagacagggcaagaaacagcatacttcctcttaaaattagcaggaagatggccagtaaaaacagtacatacagacaatggcagcaatttcaccagtactacagttaaggccgcctgttggtgggcggggatcaagcaggaatttggcattccctacaatccccaaagtcaaggagtaatagaatctatgaataaagaattaaagaaaattataggacaggtaagagatcaggctgaacatcttaagacagcagtacaaatggcagtattcatccacaattttaaaagaaaaggggggattggggggtacagtgcaggggaaagaatagtagacataatagcaacagacatacaaactaaagaattacaaaaacaaattacaaaaattcaaaattttcgggtttattacagggacagcagagatccagtttggaaaggaccagcaaagctcctctggaaaggtgaaggggcagtagtaatacaagataatagtgacataaaagtagtgccaagaagaaaagcaaagatcatcagggattatggaaaacagatggcaggtgatgattgtgtggcaagtagacaggatgaggattaacacatggaaaagattagtaaaacaccatatgtatatttcaaggaaagctaaggactggttttatagacatcactatgaaagtactaatccaaaaataagttcagaagtacacatcccactaggggatgctaaattagtaataacaacatattggggtctgcatacaggagaaagagactggcatttgggtcagggagtctccatagaatggaggaaaaagagatatagcacacaagtagaccctgacctagcagaccaactaattcatctgcactattttgattgtttttcagaatctgctataagaaataccatattaggacgtatagttagtcctaggtgtgaatatcaagcaggacataacaaggtaggatctctacagtacttggcactagcagcattaataaaaccaaaacagataaagccacctttgcctagtgttaggaaactgacagaggacagatggaacaagccccagaagaccaagggccacagagggagccatacaatgaatggacactagagcttttagaggaacttaagagtgaagctgttagacattttcctaggatatggctccataacttaggacaacatatctatgaaacttacggggatacttgggcaggagtggaagccataataagaattctgcaacaactgctgtttatccatttcagaattgggtgtcgacatagcagaataggcgttactcgacagaggagagcaagaaatggagccagtagatcctagactagagccctggaagcatccaggaagtcagcctaaaactgcttgtaccaattgctattgtaaaaagtgttgctttcattgccaagtttgtttcatgacaaaagccttaggcatctcctatggcaggaagaagcggagacagcgacgaagagctcatcagaacagtcagactcatcaagcttctctatcaaagcagtaagtagtacatgtaatgcaacctataatagtagcaatagtagcattagtagtagcaataataatagcaatagttgtgtggtccatagtaatcatagaatataggaaaatattaagacaaagaaaaatagacaggttaattgatagactaatagaaagagcagaagacagtggcaatgagagtgaaggagaagtatcagcacttgtggagatgggggtggaaatggggcaccatgctccttgggatattgatgatctgtagtgctacagaaaaattgtgggtcacagtctattatggggtacctgtgtggaaggaagcaaccaccactctattttgtgcatcagatgctaaagcatatgatacagaggtacataatgtttgggccacacatgcctgtgtacccacagaccccaacccacaagaagtagtattggtaaatgtgacagaaaattttaacatgtggaaaaatgacatggtagaacagatgcatgaggatataatcagtttatgggatcaaagcctaaagccatgtgtaaaattaaccccactctgtgttagtttaaagtgcactgatttgaagaatgatactaataccaatagtagtagcgggagaatgataatggagaaaggagagataaaaaactgctctttcaatatcagcacaagcataagagataaggtgcagaaagaatatgcattcttttataaacttgatatagtaccaatagataataccagctataggttgataagttgtaacacctcagtcattacacaggcctgtccaaaggtatcctttgagccaattcccatacattattgtgccccggctggttttgcgattctaaaatgtaataataagacgttcaatggaacaggaccatgtacaaatgtcagcacagtacaatgtacacatggaatcaggccagtagtatcaactcaactgctgttaaatggcagtctagcagaagaagatgtagtaattagatctgccaatttcacagacaatgctaaaaccataatagtacagctgaacacatctgtagaaattaattgtacaagacccaacaacaatacaagaaaaagtatccgtatccagaggggaccagggagagcatttgttacaataggaaaaataggaaatatgagacaagcacattgtaacattagtagagcaaaatggaatgccactttaaaacagatagctagcaaattaagagaacaatttggaaataataaaacaataatctttaagcaatcctcaggaggggacccagaaattgtaacgcacagttttaattgtggaggggaatttttctactgtaattcaacacaactgtttaatagtacttggtttaatagtacttggagtactgaagggtcaaataacactgaaggaagtgacacaatcacactcccatgcagaataaaacaatttataaacatgtggcaggaagtaggaaaagcaatgtatgcccctcccatcagtggacaaattagatgttcatcaaatattactgggctgctattaacaagagatggtggtaataacaacaatgggtccgagatcttcagacctggaggaggcgatatgagggacaattggagaagtgaattatataaatataaagtagtaaaaattgaaccattaggagtagcacccaccaaggcaaagagaagagtggtgcagagagaaaaaagagcagtgggaataggagctttgttccttgggttcttgggagcagcaggaagcactatgggcgcagcgtcaatgacgctgacggtacaggccagacaattattgtctgatatagtgcagcagcagaacaatttgctgagggctattgaggcgcaacagcatctgttgcaactcacagtctggggcatcaaacagctccaggcaagaatcctggctgtggaaagatacctaaaggatcaacagctcctggggatttggggttgctctggaaaactcatttgcaccactgctgtgccttggaatgctagttggagtaataaatctctggaacagatttggaataacatgacctggatggagtgggacagagaaattaacaattacacaagcttaatacactccttaattgaagaatcgcaaaaccagcaagaaaagaatgaacaagaattattggaattagataaatgggcaagtttgtggaattggtttaacataacaaattggctgtggtatataaaattattcataatgatagtaggaggcttggtaggtttaagaatagtttttgctgtactttctatagtgaatagagttaggcagggatattcaccattatcgtttcagacccacctcccaatcccgaggggacccgacaggcccgaaggaatagaagaagaaggtggagagagagacagagacagatccattcgattagtgaacggatccttagcacttatctgggacgatctgcggagcctgtgcctcttcagctaccaccgcttgagagacttactcttgattgtaacgaggattgtggaacttctgggacgcagggggtgggaagccctcaaatattggtggaatctcctacagtattggagtcaggaactaaagaatagtgctgttaacttgctcaatgccacagccatagcagtagctgaggggacagatagggttatagaagtattacaagcagcttatagagctattcgccacatacctagaagaataagacagggcttggaaaggattttgctataagatgggtggcaagtggtcaaaaagtagtgtgattggatggcctgctgtaagggaaagaatgagacgagctgagccagcagcagatggggtgggagcagtatctcgagacctagaaaaacatggagcaatcacaagtagcaatacagcagctaacaatgctgcttgtgcctggctagaagcacaagaggaggaagaggtgggttttccagtcacacctcaggtacctttaagaccaatgacttacaaggcagctgtagatcttagccactttttaaaagaaaaggggggactggaagggctaattcactcccaaagaagacaagatatccttgatctgtggatctaccacacacaaggctacttccctgattggcagaactacacaccagggccaggggtcagatatccactgacctttggatggtgctacaagctagtaccagttgagccagataaggtagaagaggccaataaaggagagaacaccagcttgttacaccctgtgagcctgcatggaatggatgaccctgagagagaagtgttagagtggaggtttgacagccgcctagcatttcatcacgtggcccgagagctgcatccggagtacttcaagaactgctgacatcgagcttgctacaagggactttccgctggggactttccagggaggcgtggcctgggcgggactggggagtggcgagccctcagatgctgcatataagcagctgctttttgcctgtactgggtctctctggttagaccagatctgagcctgggagctctctggctaactagggaacccactgcttaagcctcaataaagcttgccttgagtgcttcaagtagtgtgtgcccgtctgttgtgtgactctggtaactagagatccctcagacccttttagtcagtgtggaaaatctctagca

SEQ ID NO: 112 - DNA, 8053 bp, Artificial Sequence
  Synthetic Sequence
tggaagggctaatttggtcccaaaaaagacaagagatccttgatctgtggatctaccacacacaaggctacttccctgattggcagaactacacaccagggccagggatcagatatccactgacctttggatggtgcttcaagttagtaccagttgaaccagagcaagtagaagaggccaatgaaggagagaacaacagcttgttacaccctatgagccagcatgggatggaggacccggagggagaagtattagtgtggaagtttgacagcctcctagcatttcgtcacatggcccgagagctgcatccggagtactacaaagactgctgacatcgagctttctacaagggactttccgctggggactttccagggaggtgtggcctgggcgggactggggagtggcgagccctcagatgctacatataagcagctgctttttgcctgtactgggtctctctggttagaccagatctgagcctgggagctctctggctaactagggaacccactgcttaagcctcaataaagcttgccttgagtgctcaaagtagtgtgtgcccgtctgttgtgtgactctggtaactagagatccctcagacccttttagtcagtgtggaaaatctctagcagtggcgcccgaacagggacttgaaagcgaaagtaaagccagaggagatctctcgacgcaggactcggcttgctgaagcgcgcacggcaagaggcgaggggcggcgactggtgagtacgccaaaaattttgactagcggaggctagaaggagagagatgggtgcgagagcgtcggtattaagcgggggagaattagataaatgggaaaaaattcggttaaggccagggggaaagaaacaatataaactaaaacatatagtatgggcaagcagggagctagaacgattcgcagttaatcctggccttttagagacatcagaaggctgtagacaaatactgggacagctacaaccatcccttcagacaggatcagaagaacttagatcattatataatacaatagcagtcctctattgtgtgcatcaaaggatagatgtaaaagacaccaaggaagccttagataagatagaggaagagcaaaacaaaagtaagaaaaaggcacagcaagcagcagctgacacaggaaacaacagccaggtcagccaaaattaccctatagtgcagaacctccaggggcaaatggtacatcaggccatatcacctagaactttaaatgcatgggtaaaagtagtagaagagaaggctttcagcccagaagtaatacccatgttttcagcattatcagaaggagccaccccacaagatttaaataccatgctaaacacagtggggggacatcaagcagccatgcaaatgttaaaagagaccatcaatgaggaagctgcagaatgggatagattgcatccagtgcatgcagggcctattgcaccaggccagatgagagaaccaaggggaagtgacatagcaggaactactagtacccttcaggaacaaataggatggatgacacataatccacctatcccaaccgtccatgaagggttcgatggcgaccctcggccgtggactatggcaacggcagattcgttaaatgaatttgccaggaagatggaaaccaaaaatgatagggggaattggaggttttatcaaagtaagacagtatgatcagatactcatagaaatctgcggacataaagctataggtacagtattagtaggacctacacctgtcaacataattggaagaaatctgttgactcagattggctgcactttaaattttcccattagtcctattgagactgtaccagtaaaattaaagccaggaatggatggcccaaaagttaaacaatggccattgacagaagaaaaaataaaagcattagtagaaatttgtacagaaatggaaaaggaaggaaaaatttcaaaaattgggcctgaaaatccatacaatactccagtatttgccataaagaaaaaagacagtactaaatggagaaaattagtagatttcagagaacttaataagagaactcaagatttctgggaagttcaattaggaataccacatcctgcagggttaaaacagaaaaaatcagtaacagtactggatgtgggcgatgcatatttttcagttcccttagataaagacttcaggaagtatactgcatttaccatacctagtataaacaatgagacaccagggattagatatcagtacaatgtgcttccacagggatggaaaggatcaccagcaatattccagtgtagcatgacaaaaatcttagagccttttagaaaacaaaatccagacatagtcatctatcaatacatggatgatttgtatgtaggatctgacttagaaatagggcagcatagaacaaaaatagaggaactgagacaacatctgttgaggtggggatttaccacaccagacaaaaaacatcagaaagaacctccattcctttggatgggttatgaactccatcctgataaatggacagtacagcctatagtgctgccagaaaaggacagctggactgtcaatgacatacagaaattagtgggaaaattgaattgggcaagtcagatttatgcagggattaaagtaaggcaattatgtaaacttcttaggggaaccaaagcactaacagaagtagtaccactaacagaagaagcagagctagaactggcagaaaacagggagattctaaaagaaccggtacatggagtgtattatgacccatcaaaagacttaatagcagaaatacagaagcaggggcaaggccaatggacatatcaaatttatcaagagccatttaaaaatctgaaaacaggaaagtatgcaagaatgaagggtgcccacactaatgatgtgaaacaattaacagaggcagtacaaaaaatagccacagaaagcatagtaatatggggaaagactcctaaatttaaattacccatacaaaaggaaacatgggaagcatggtggacagagtattggcaagccacctggattcctgagtgggagtttgtcaatacccctcccttagtgaagttatggtaccagttagagaaagaacccataataggagcagaaactttctatgtagatggggcagccaatagggaaactaaattaggaaaagcaggatatgtaactgacagaggaagacaaaaagttgtccccctaacggacacaacaaatcagaagactgagttacaagcaattcatctagctttgcaggattcgggattagaagtaaacatagtgacagactcacaatatgcattgggaatcattcaagcacaaccagataagagtgaatcagagttagtcagtcaaataatagagcagttaataaaaaaggaaaaagtctacctggcatgggtaccagcacacaaaggaattggaggaaatgaacaagtagataaattggtcagtgctggaatcaggaaagtactatttttagatggaatagataaggcccaagaagaacatgagaaatatcacagtaattggagagcaatggctagtgattttaacctaccacctgtagtagcaaaagaaatagtagccagctgtgataaatgtcagctaaaaggggaagccatgcatggacaagtagactgtagcccaggaatatggcagctagattgtacacatttagaaggaaaagttatcttggtagcagttcatgtagccagtggatatatagaagcagaagtaattccagcagagacagggcaagaaacagcatacttcctcttaaaattagcaggaagatggccagtaaaaacagtacatacagacaatggcagcaatttcaccagtactacagttaaggccgcctgttggtgggcggggatcaagcaggaatttggcattccctacaatccccaaagtcaaggagtaatagaatctatgaataaagaattaaagaaaattataggacaggtaagagatcaggctgaacatcttaagacagcagtacaaatggcagtattcatccacaattttaaaagaaaaggggggattggggggtacagtgcaggggaaagaatagtagacataatagcaacagacatacaaactaaagaattacaaaaacaaattacaaaaattcaaaattttcgggtttattacagggacagcagagatccagtttggaaaggaccagcaaagctcctctggaaaggtgaaggggcagtagtaatacaagataatagtgacataaaagtagtgccaagaagaaaagcaaagatcatcagggattatggaaaacagatggcaggtgatgattgtgtggcccgtccatgaagggttcgattcttgaacagcgcggtctgttatggcaacggcagattcgtttaatgcaacctataatagtagcaatagtagcattagtagtagcaataataatagcaatagttgtgtggtccatagtaatcatagaatataggaaaatattaagacaaagaaaaatagacaggttaattgatagactaatagaaagagcagaagacagtggcaatgagagtgaaggagaagtatcagcacttgtggagatgggggtggaaatggggcaccatgctccttgggatattgatgatctgtagtgctacagaaaaattgtgggtcacagtctattatggggtacctgtgtggaaggaagcaaccaccactctattttgtgcatcagatgctaaagcatatgatacagaggtacataatgtttgggccacacatgcctgtgtacccacagaccccaacccacaagaagtagtattggtaaatgtgacagaaaattttaacatgtggaaaaatgacatggtagaacagatgcatgaggatataatcagtttatgggatcaaagcctaaagccatgtgtaaaattaaccccactctgtgttagtttaaagtgcactgatttgaagaatgatactaataccaatagtagtagcgggagaatgataatggagaaaggagagataaaaaactgctctttcaatatcagcacaagcataagagataaggtgcagaaagaatatgcattcttttataaacttgatatagtaccaatagataataccagctataggttgataagttgtaacacctcagtcattacacaggcctgtccaaaggtatcctttgagccaattcccatacattattgtgccccggctggttttgcgattctaaaatgtaataataagacgttcaatggaacaggaccatgtacaaatgtcagcacagtacaatgtacacatggaatcaggccagtagtatcaactcaactgctgttaaatggcagtctagcagaagaagatgtagtaattagatctgccaatttcacagacaatgctaaaaccataatagtacagctgaacacatctgtagaaattaattgtacaagacccaacaacaatacaagaaaaagtatccgtatccagaggggaccagggagagcatttgttacaataggaaaaataggaaatatgagacaagcacattgtaacattagtagagcaaaatggaatgccactttaaaacagatagctagcaaattaagagaacaatttggaaataataaaacaataatctttaagcaatcctcaggaggggacccagaaattgtaacgcacagttttaattgtggaggggaatttttctactgtaattcaacacaactgtttaatagtacttggtttaatagtacttggagtactgaagggtcaaataacactgaaggaagtgacacaatcacactcccatgcagaataaaacaatttataaacatgtggcaggaagtaggaaaagcaatgtatgcccctcccatcagtggacaaattagatgttcatcaaatattactgggctgctattaacaagagatggtggtaataacaacaatgggtccgagatcttcagacctggaggaggcgatatgagggacaattggagaagtgaattatataaatataaagtagtaaaaattgaaccattaggagtagcacccaccaaggcaaagagaagagtggtgcagagagaaaaaagagcagtgggaataggagctttgttccttgggttcttgggagcagcaggaagcactatgggcgcagcgtcaatgacgctgacggtacaggccagacaattattgtctgatatagtgcagcagcagaacaatttgctgagggctattgaggcgcaacagcatctgttgcaactcacagtctggggcatcaaacagctccaggcaagaatcctggctgtggaaagatacctaaaggatcaacagctcctggggatttggggttgctctggaaaactcatttgcaccactgctgtgccttggaatgctagttggagtaataaatctctggaacagatttggaataacatgacctggatggagtgggacagagaaattaacaattacacaagcttaatacactccttaattgaagaatcgcaaaaccagcaagaaaagaatgaacaagaattattggaattagataaatgggcaagtttgtggaattggtttaacataacaaattggctgtggtatataaaattattcataatgatagtaggaggcttggtaggtttaagaatagtttttgctgtactttctatagtgaatagagttaggcagggatattcaccattatcgtttcagacccacctcccaatcccgaggggacccgacaggcccgaaggaatagaagaagaaggtggagagagagacagagacagatccattcgattagtgaacggatccttagcacttatctgggacgatctgcggagcctgtgcctcttcagctaccaccgcttgagagacttactcttgattgtaacgaggattgtggaacttctgggacgcagggggtgggaagccctcaaatattggtggaatctcctacagtattggagtcaggaactaaagaatagtgctgttaacttgctcaatgccacagccatagcagtagctgaggggacagatagggttatagaagtattacaagcagcttatagagctattcgccacatacctagaagaataagacagggcttggaaaggattttgctataagatgggtggcaagtggtcaaaaagtagtgtgattggatggcctgctgtaagggaaagaatgagacgagctgagccagcagcagatggggtgggagcagtatctcgagacctagaaaaacatggagcaatcacaagtagcaatacagcagctaacaatgctgcttgtgcctggctagaagcacaagaggaggaagaggtgggttttccagtcacacctcaggtacctttaagaccaatgacttacaaggcagctgtagatcttagccactttttaaaagaaaaggggggactggaagggctaattcactcccaaagaagacaagatatccttgatctgtggatctaccacacacaaggctacttccctgattggcagaactacacaccagggccaggggtcagatatccactgacctttggatggtgctacaagctagtaccagttgagccagataaggtagaagaggccaataaaggagagaacaccagcttgttacaccctgtgagcctgcatggaatggatgaccctgagagagaagtgttagagtggaggtttgacagccgcctagcatttcatcacgtggcccgagagctgcatccggagtacttcaagaactgctgacatcgagcttgctacaagggactttccgctggggactttccagggaggcgtggcctgggcgggactggggagtggcgagccctcagatgctgcatataagcagctgctttttgcctgtactgggtctctctggttagaccagatctgagcctgggagctctctggctaactagggaacccactgcttaagcctcaataaagcttgccttgagtgcttcaagtagtgtgtgcccgtctgttgtgtgactctggtaactagagatccctcagacccttttagtcagtgtggaaaatctctagca

SEQ ID NO: 113 - DNA, 7828 bp, Artificial Sequence
  Synthetic Sequence
tggaagggctaatttggtcccaaaaaagacaagagatccttgatctgtggatctaccacacacaaggctacttccctgattggcagaactacacaccagggccagggatcagatatccactgacctttggatggtgcttcaagttagtaccagttgaaccagagcaagtagaagaggccaatgaaggagagaacaacagcttgttacaccctatgagccagcatgggatggaggacccggagggagaagtattagtgtggaagtttgacagcctcctagcatttcgtcacatggcccgagagctgcatccggagtactacaaagactgctgacatcgagctttctacaagggactttccgctggggactttccagggaggtgtggcctgggcgggactggggagtggcgagccctcagatgctacatataagcagctgctttttgcctgtactgggtctctctggttagaccagatctgagcctgggagctctctggctaactagggaacccactgcttaagcctcaataaagcttgccttgagtgctcaaagtagtgtgtgcccgtctgttgtgtgactctggtaactagagatccctcagacccttttagtcagtgtggaaaatctctagcagtggcgcccgaacagggacttgaaagcgaaagtaaagccagaggagatctctcgacgcaggactcggcttgctgaagcgcgcacggcaagaggcgaggggcggcgactggtgagtacgccaaaaattttgactagcggaggctagaaggagagagatgggtgcgagagcgtcggtattaagcgggggagaattagataaatgggaaaaaattcggttaaggccagggggaaagaaacaatataaactaaaacatatagtatgggcaagcagggagctagaacgattcgcagttaatcctggccttttagagacatcagaaggctgtagacaaatactgggacagctacaaccatcccttcagacaggatcagaagaacttagatcattatataatacaatagcagtcctctattgtgtgcatcaaaggatagatgtaaaagacaccaaggaagccttagataagatagaggaagagcaaaacaaaagtaagaaaaaggcacagcaagcagcagctgacacaggaaacaacagccaggtcagccaaaattaccctatagtgcagaacctccaggggcaaatggtacatcaggccatatcacctagaactttaaatgcatgggtaaaagtagtagaagagaaggctttcagcccagaagtaatacccatgttttcagcattatcagaaggagccaccccacaagatttaaataccatgctaaacacagtggggggacatcaagcagccatgcaaatgttaaaagagaccatcaatgaggaagctgcagaatgggatagattgcatccagtgcatgcagggcctattgcaccaggccagatgagagaaccaaggggaagtgacatagcaggaactactagtacccttcaggaacaaataggatggatgacacataatccacctatcccaaccgtccatgaagggttcgatggcgaccctcggccgtggactatggcaacggcagattcgttaaatgaatttgccaggaagatggaaaccaaaaatgatagggggaattggaggttttatcaaagtaagacagtatgatcagatactcatagaaatctgcggacataaagctataggtacagtattagtaggacctacacctgtcaacataattggaagaaatctgttgactcagattggctgcactttaaattttcccattagtcctattgagactgtaccagtaaaattaaagccaggaatggatggcccaaaagttaaacaatggccattgacagaagaaaaaataaaagcattagtagaaatttgtacagaaatggaaaaggaaggaaaaatttcaaaaattgggcctgaaaatccatacaatactccagtatttgccataaagaaaaaagacagtactaaatggagaaaattagtagatttcagagaacttaataagagaactcaagatttctgggaagttcaattaggaataccacatcctgcagggttaaaacagaaaaaatcagtaacagtactggatgtgggcgatgcatatttttcagttcccttagataaagacttcaggaagtatactgcatttaccatacctagtataaacaatgagacaccagggattagatatcagtacaatgtgcttccacagggatggaaaggatcaccagcaatattccagtgtagcatgacaaaaatcttagagccttttagaaaacaaaatccagacatagtcatctatcaatacatggatgatttgtatgtaggatctgacttagaaatagggcagcatagaacaaaaatagaggaactgagacaacatctgttgaggtggggatttaccacaccagacaaaaaacatcagaaagaacctccattcctttggatgggttatgaactccatcctgataaatggacagtacagcctatagtgctgccagaaaaggacagctggactgtcaatgacatacagaaattagtgggaaaattgaattgggcaagtcagatttatgcagggattaaagtaaggcaattatgtaaacttcttaggggaaccaaagcactaacagaagtagtaccactaacagaagaagcagagctagaactggcagaaaacagggagattctaaaagaaccggtacatggagtgtattatgacccatcaaaagacttaatagcagaaatacagaagcaggggcaaggccaatggacatatcaaatttatcaagagccatttaaaaatctgaaaacaggaaagtatgcaagaatgaagggtgcccacactaatgatgtgaaacaattaacagaggcagtacaaaaaatagccacagaaagcatagtaatatggggaaagactcctaaatttaaattacccatacaaaaggaaacatgggaagcatggtggacagagtattggcaagccacctggattcctgagtgggagtttgtcaatacccctcccttagtgaagttatggtaccagttagagaaagaacccataataggagcagaaactttctatgtagatggggcagccaatagggaaactaaattaggaaaagcaggatatgtaactgacagaggaagacaaaaagttgtccccctaacggacacaacaaatcagaagactgagttacaagcaattcatctagctttgcaggattcgggattagaagtaaacatagtgacagactcacaatatgcattgggaatcattcaagcacaaccagataagagtgaatcagagttagtcagtcaaataatagagcagttaataaaaaaggaaaaagtctacctggcatgggtaccagcacacaaaggaattggaggaaatgaacaagtagataaattggtcagtgctggaatcaggaaagtactatttttagatggaatagataaggcccaagaagaacatgagaaatatcacagtaattggagagcaatggctagtgattttaacctaccacctgtagtagcaaaagaaatagtagccagctgtgataaatgtcagctaaaaggggaagccatgcatggacaagtagactgtagcccaggaatatggcagctagattgtacacatttagaaggaaaagttatcttggtagcagttcatgtagccagtggatatatagaagcagaagtaattccagcagagacagggcaagaaacagcatacttcctcttaaaattagcaggaagatggccagtaaaaacagtacatacagacaatggcagcaatttcaccagtactacagttaaggccgcctgttggtgggcggggatcaagcaggaatttggcattccctacaatccccaaagtcaaggagtaatagaatctatgaataaagaattaaagaaaattataggacaggtaagagatcaggctgaacatcttaagacagcagtacaaatggcagtattcatccacaattttaaaagaaaaggggggattggggggtacagtgcaggggaaagaatagtagacataatagcaacagacatacaaactaaagaattacaaaaacaaattacaaaaattcaaaattttcgggtttattacagggacagcagagatccagtttggaaaggaccagcaaagctcctctggaaaggtgaaggggcagtagtaatacaagataatagtgacataaaagtagtgccaagaagaaaagcaaagatcatcagggattaaccgtccatgaagggttcgattatctgtagccaacattcgatatggcaacggcagattcgttggagatgggggtggaaatggggcaccatgctccttgggatattgatgatctgtagtgctacagaaaaattgtgggtcacagtctattatggggtacctgtgtggaaggaagcaaccaccactctattttgtgcatcagatgctaaagcatatgatacagaggtacataatgtttgggccacacatgcctgtgtacccacagaccccaacccacaagaagtagtattggtaaatgtgacagaaaattttaacatgtggaaaaatgacatggtagaacagatgcatgaggatataatcagtttatgggatcaaagcctaaagccatgtgtaaaattaaccccactctgtgttagtttaaagtgcactgatttgaagaatgatactaataccaatagtagtagcgggagaatgataatggagaaaggagagataaaaaactgctctttcaatatcagcacaagcataagagataaggtgcagaaagaatatgcattcttttataaacttgatatagtaccaatagataataccagctataggttgataagttgtaacacctcagtcattacacaggcctgtccaaaggtatcctttgagccaattcccatacattattgtgccccggctggttttgcgattctaaaatgtaataataagacgttcaatggaacaggaccatgtacaaatgtcagcacagtacaatgtacacatggaatcaggccagtagtatcaactcaactgctgttaaatggcagtctagcagaagaagatgtagtaattagatctgccaatttcacagacaatgctaaaaccataatagtacagctgaacacatctgtagaaattaattgtacaagacccaacaacaatacaagaaaaagtatccgtatccagaggggaccagggagagcatttgttacaataggaaaaataggaaatatgagacaagcacattgtaacattagtagagcaaaatggaatgccactttaaaacagatagctagcaaattaagagaacaatttggaaataataaaacaataatctttaagcaatcctcaggaggggacccagaaattgtaacgcacagttttaattgtggaggggaatttttctactgtaattcaacacaactgtttaatagtacttggtttaatagtacttggagtactgaagggtcaaataacactgaaggaagtgacacaatcacactcccatgcagaataaaacaatttataaacatgtggcaggaagtaggaaaagcaatgtatgcccctcccatcagtggacaaattagatgttcatcaaatattactgggctgctattaacaagagatggtggtaataacaacaatgggtccgagatcttcagacctggaggaggcgatatgagggacaattggagaagtgaattatataaatataaagtagtaaaaattgaaccattaggagtagcacccaccaaggcaaagagaagagtggtgcagagagaaaaaagagcagtgggaataggagctttgttccttgggttcttgggagcagcaggaagcactatgggcgcagcgtcaatgacgctgacggtacaggccagacaattattgtctgatatagtgcagcagcagaacaatttgctgagggctattgaggcgcaacagcatctgttgcaactcacagtctggggcatcaaacagctccaggcaagaatcctggctgtggaaagatacctaaaggatcaacagctcctggggatttggggttgctctggaaaactcatttgcaccactgctgtgccttggaatgctagttggagtaataaatctctggaacagatttggaataacatgacctggatggagtgggacagagaaattaacaattacacaagcttaatacactccttaattgaagaatcgcaaaaccagcaagaaaagaatgaacaagaattattggaattagataaatgggcaagtttgtggaattggtttaacataacaaattggctgtggtatataaaattattcataatgatagtaggaggcttggtaggtttaagaatagtttttgctgtactttctatagtgaatagagttaggcagggatattcaccattatcgtttcagacccacctcccaatcccgaggggacccgacaggcccgaaggaatagaagaagaaggtggagagagagacagagacagatccattcgattagtgaacggatccttagcacttatctgggacgatctgcggagcctgtgcctcttcagctaccaccgcttgagagacttactcttgattgtaacgaggattgtggaacttctgggacgcagggggtgggaagccctcaaatattggtggaatctcctacagtattggagtcaggaactaaagaatagtgctgttaacttgctcaatgccacagccatagcagtagctgaggggacagatagggttatagaagtattacaagcagcttatagagctattcgccacatacctagaagaataagacagggcttggaaaggattttgctataagatgggtggcaagtggtcaaaaagtagtgtgattggatggcctgctgtaagggaaagaatgagacgagctgagccagcagcagatggggtgggagcagtatctcgagacctagaaaaacatggagcaatcacaagtagcaatacagcagctaacaatgctgcttgtgcctggctagaagcacaagaggaggaagaggtgggttttccagtcacacctcaggtacctttaagaccaatgacttacaaggcagctgtagatcttagccactttttaaaagaaaaggggggactggaagggctaattcactcccaaagaagacaagatatccttgatctgtggatctaccacacacaaggctacttccctgattggcagaactacacaccagggccaggggtcagatatccactgacctttggatggtgctacaagctagtaccagttgagccagataaggtagaagaggccaataaaggagagaacaccagcttgttacaccctgtgagcctgcatggaatggatgaccctgagagagaagtgttagagtggaggtttgacagccgcctagcatttcatcacgtggcccgagagctgcatccggagtacttcaagaactgctgacatcgagcttgctacaagggactttccgctggggactttccagggaggcgtggcctgggcgggactggggagtggcgagccctcagatgctgcatataagcagctgctttttgcctgtactgggtctctctggttagaccagatctgagcctgggagctctctggctaactagggaacccactgcttaagcctcaataaagcttgccttgagtgcttcaagtagtgtgtgcccgtctgttgtgtgactctggtaactagagatccctcagacccttttagtcagtgtggaaaatctctagca

SEQ ID NO: 114 - DNA, 8052 bp, Artificial Sequence
  Synthetic Sequence
tggaagggctaatttggtcccaaaaaagacaagagatccttgatctgtggatctaccacacacaaggctacttccctgattggcagaactacacaccagggccagggatcagatatccactgacctttggatggtgcttcaagttagtaccagttgaaccagagcaagtagaagaggccaatgaaggagagaacaacagcttgttacaccctatgagccagcatgggatggaggacccggagggagaagtattagtgtggaagtttgacagcctcctagcatttcgtcacatggcccgagagctgcatccggagtactacaaagactgctgacatcgagctttctacaagggactttccgctggggactttccagggaggtgtggcctgggcgggactggggagtggcgagccctcagatgctacatataagcagctgctttttgcctgtactgggtctctctggttagaccagatctgagcctgggagctctctggctaactagggaacccactgcttaagcctcaataaagcttgccttgagtgctcaaagtagtgtgtgcccgtctgttgtgtgactctggtaactagagatccctcagacccttttagtcagtgtggaaaatctctagcagtggcgcccgaacagggacttgaaagcgaaagtaaagccagaggagatctctcgacgcaggactcggcttgctgaagcgcgcacggcaagaggcgaggggcggcgactggtgagtacgccaaaaattttgactagcggaggctagaaggagagagatgggtgcgagagcgtcggtattaagcgggggagaattagataaatgggaaaaaattcggttaaggccagggggaaagaaacaatataaactaaaacatatagtatgggcaagcagggagctagaacgattcgcagttaatcctggccttttagagacatcagaaggctgtagacaaatactgggacagctacaaccatcccttcagacaggatcagaagaacttagatcattatataatacaatagcagtcctctattgtgtgcatcaaaggatagatgtaaaagacaccaaggaagccttagataagatagaggaagagcaaaacaaaagtaagaaaaaggcacagcaagcagcagctgacacaggaaacaacagccaggtcagccaaaattaccctatagtgcagaacctccaggggcaaatggtacatcaggccatatcacctagaactttaaatgcatgggtaaaagtagtagaagagaaggctttcagcccagaagtaatacccatgttttcagcattatcagaaggagccaccccacaagatttaaataccatgctaaacacagtggggggacatcaagcagccatgcaaatgttaaaagagaccatcaatgaggaagctgcagaatgggatagattgcatccagtgcatgcagggcctattgcaccaggccagatgagagaaccaaggggaagtgacatagcaggaactactagtacccttcaggaacaaataggatggatgacacataatccacctatcccaaccgtccatgaagggttcgatggcgaccctcggccgtggactatggcaacggcagattcgttaaatgaatttgccaggaagatggaaaccaaaaatgatagggggaattggaggttttatcaaagtaagacagtatgatcagatactcatagaaatctgcggacataaagctataggtacagtattagtaggacctacacctgtcaacataattggaagaaatctgttgactcagattggctgcactttaaattttcccattagtcctattgagactgtaccagtaaaattaaagccaggaatggatggcccaaaagttaaacaatggccattgacagaagaaaaaataaaagcattagtagaaatttgtacagaaatggaaaaggaaggaaaaatttcaaaaattgggcctgaaaatccatacaatactccagtatttgccataaagaaaaaagacagtactaaatggagaaaattagtagatttcagagaacttaataagagaactcaagatttctgggaagttcaattaggaataccacatcctgcagggttaaaacagaaaaaatcagtaacagtactggatgtgggcgatgcatatttttcagttcccttagataaagacttcaggaagtatactgcatttaccatacctagtataaacaatgagacaccagggattagatatcagtacaatgtgcttccacagggatggaaaggatcaccagcaatattccagtgtagcatgacaaaaatcttagagccttttagaaaacaaaatccagacatagtcatctatcaatacatggatgatttgtatgtaggatctgacttagaaatagggcagcatagaacaaaaatagaggaactgagacaacatctgttgaggtggggatttaccacaccagacaaaaaacatcagaaagaacctccattcctttggatgggttatgaactccatcctgataaatggacagtacagcctatagtgctgccagaaaaggacagctggactgtcaatgacatacagaaattagtgggaaaattgaattgggcaagtcagatttatgcagggattaaagtaaggcaattatgtaaacttcttaggggaaccaaagcactaacagaagtagtaccactaacagaagaagcagagctagaactggcagaaaacagggagattctaaaagaaccggtacatggagtgtattatgacccatcaaaagacttaatagcagaaatacagaagcaggggcaaggccaatggacatatcaaatttatcaagagccatttaaaaatctgaaaacaggaaagtatgcaagaatgaacgaatctgccgttgccatatacagcatctgaacaagctgatcgaacccttcatggacggttaaggccgcctgttggtgggcggggatcaagcaggaatttggcattccctacaatccccaaagtcaaggagtaatagaatctatgaataaagaattaaagaaaattataggacaggtaagagatcaggctgaacatcttaagacagcagtacaaatggcagtattcatccacaattttaaaagaaaaggggggattggggggtacagtgcaggggaaagaatagtagacataatagcaacagacatacaaactaaagaattacaaaaacaaattacaaaaattcaaaattttcgggtttattacagggacagcagagatccagtttggaaaggaccagcaaagctcctctggaaaggtgaaggggcagtagtaatacaagataatagtgacataaaagtagtgccaagaagaaaagcaaagatcatcagggattatggaaaacagatggcaggtgatgattgtgtggcaagtagacaggatgaggattaacacatggaaaagattagtaaaacaccatatgtatatttcaaggaaagctaaggactggttttatagacatcactatgaaagtactaatccaaaaataagttcagaagtacacatcccactaggggatgctaaattagtaataacaacatattggggtctgcatacaggagaaagagactggcatttgggtcagggagtctccatagaatggaggaaaaagagatatagcacacaagtagaccctgacctagcagaccaactaattcatctgcactattttgattgtttttcagaatctgctataagaaataccatattaggacgtatagttagtcctaggtgtgaatatcaagcaggacataacaaggtaggatctctacagtacttggcactagcagcattaataaaaccaaaacagataaagccacctttgcctagtgttaggaaactgacagaggacagatggaacaagccccagaagaccaagggccacagagggagccatacaatgaatggacactagagcttttagaggaacttaagagtgaagctgttagacattttcctaggatatggctccataacttaggacaacatatctatgaaacttacggggatacttgggcaggagtggaagccataataagaattctgcaacaactgctgtttatccatttcagaattgggtgtcgacatagcagaataggcgttactcgacagaggagagcaagaaatggagccagtagatcctagactagagccctggaagcatccaggaagtcagcctaaaactgcttgtaccaattgctattgtaaaaagtgttgctttcattgccaagtttgtttcatgacaaaagccttaggcatctcctatggcaggaagaagcggagacagcgacgaagagctcatcagaacagtcagactcatcaagcttctctatcaaagcagtaagtagtacatgtaatgcaacctataatagtagcaatagtagcattagtagtagcaataataatagcaatagttgtgtggtccatagtaatcatagaatataggaaaatattaagacaaagaaaaatagacaggttaattgatagactaatagaaagagcagaagacagtggcaatgagagtgaaggagaagtatcagcacttgtggagatgggggtggaaatggggcaccatgctccttgggatattgatgatctgtagtgctacagaaaaattgtgggtcacagtctattatggggtacctgtgtggaaggaagcaaccaccactctattttgtgcatcagatgctaaagcatatgatacagaggtacataatgtttgggccacacatgcctgtgtacccacagaccccaacccacaagaagtagtattggtaaatgtgacagaaaattttaacatgtggaaaaatgacatggtagaacagatgcatgaggatataatcagtttatgggatcaaagcctaaagccatgtgtaaaattaaccccactctgtgttagtttaaagtgcactgatttgaagaatgatactaataccaatagtagtagcgggagaatgataatggagaaaggagagataaaaaactgctctttcaatatcagcacaagcataagagataaggtgcagaaagaatatgcattcttttataaacttgatatagtaccaatagataataccagctataggttgataagttgtaacacctcagtcattacacaggcctgtccaaaggtatcctttgagccaattcccatacattattgtgccccggctggttttgcgattctaaaatgtaataataagacgttcaatggaacaggaccatgtacaaatgtcagcacagtacaatgtacacatggaatcaggccagtagtatcaactcaactgctgttaaatggcagtctagcagaagaagatgtagtaattagatctgccaatttcacagacaatgctaaaaccataatagtacagctgaacacatctgtagaaattaattgtacaagacccaacaacaatacaagaaaaagtatccgtatccagaggggaccagggagagcatttgttacaataggaaaaataggaaatatgagacaagcacattgtaacattagtagagcaaaatggaatgccactttaaaacagatagctagcaaattaagagaacaatttggaaataataaaacaataatctttaagcaatcctcaggaggggacccagaaattgtaacgcacagttttaattgtggaggggaatttttctactgtaattcaacacaactgtttaatagtacttggtttaatagtacttggagtactgaagggtcaaataacactgaaggaagtgacacaatcacactcccatgcagaataaaacaatttataaacatgtggcaggaagtaggaaaagcaatgtatgcccctcccatcagtggacaaattagatgttcatcaaatattactgggctgctattaacaagagatggtggtaataacaacaatgggtccgagatcttcagacctggaggaggcgatatgagggacaattggagaagtgaattatataaatataaagtagtaaaaattgaaccattaggagtagcacccaccaaggcaaagagaagagtggtgcagagagaaaaaagagcagtgggaataggagctttgttccttgggttcttgggagcagcaggaagcactatgggcgcagcgtcaatgacgctgacggtacaggccagacaattattgtctgatatagtgcagcagcagaacaatttgctgagggctattgaggcgcaacagcatctgttgcaactcacagtctggggcatcaaacagctccaggcaagaatcctggctgtggaaagatacctaaaggatcaacagctcctggggatttggggttgctctggaaaactcatttgcaccactgctgtgccttggaatgctagttggagtaataaatctctggaacagatttggaataacatgacctggatggagtgggacagagaaattaacaattacacaagcttaatacactccttaattgaagaatcgcaaaaccagcaagaaaagaatgaacaagaattattggaattagataaatgggcaagtttgtggaattggtttaacataacaaattggctgtggtatataaaattattcataatgatagtaggaggcttggtaggtttaagaatagtttttgctgtactttctatagtgaatagagttaggcagggatattcaccattatcgtttcagacccacctcccaatcccgaggggacccgacaggcccgaaggaatagaagaagaaggtggagagagagacagagacagatccattcgattagtgaacggatccttagcacttatctgggacgatctgcggagcctgtgcctcttcagctaccaccgcttgagagacttactcttgattgtaacgaggattgtggaacttctgggacgcagggggtgggaagccctcaaatattggtggaatctcctacagtattggagtcaggaactaaagaatagtgctgttaacttgctcaatgccacagccatagcagtagctgaggggacagatagggttatagaagtattacaagcagcttatagagctattcgccacatacctagaagaataagacagggcttggaaaggattttgctataagatgggtggcaagtggtcaaaaagtagtgtgattggatggcctgctgtaagggaaagaatgagacgagctgagccagcagcagatggggtgggagcagtatctcgagacctagaaaaacatggagcaatcacaagtagcaatacagcagctaacaatgctgcttgtgcctggctagaagcacaagaggaggaagaggtgggttttccagtcacacctcaggtacctttaagaccaatgacttacaaggcagctgtagatcttagccactttttaaaagaaaaggggggactggaagggctaattcactcccaaagaagacaagatatccttgatctgtggatctaccacacacaaggctacttccctgattggcagaactacacaccagggccaggggtcagatatccactgacctttggatggtgctacaagctagtaccagttgagccagataaggtagaagaggccaataaaggagagaacaccagcttgttacaccctgtgagcctgcatggaatggatgaccctgagagagaagtgttagagtggaggtttgacagccgcctagcatttcatcacgtggcccgagagctgcatccggagtacttcaagaactgctgacatcgagcttgctacaagggactttccgctggggactttccagggaggcgtggcctgggcgggactggggagtggcgagccctcagatgctgcatataagcagctgctttttgcctgtactgggtctctctggttagaccagatctgagcctgggagctctctggctaactagggaacccactgcttaagcctcaataaagcttgccttgagtgcttcaagtagtgtgtgcccgtctgttgtgtgactctggtaactagagatccctcagacccttttagtcagtgtggaaaatctctagca

SEQ ID NO: 115 - DNA, 7129 bp, Artificial Sequence
  Synthetic Sequence
tggaagggctaatttggtcccaaaaaagacaagagatccttgatctgtggatctaccacacacaaggctacttccctgattggcagaactacacaccagggccagggatcagatatccactgacctttggatggtgcttcaagttagtaccagttgaaccagagcaagtagaagaggccaatgaaggagagaacaacagcttgttacaccctatgagccagcatgggatggaggacccggagggagaagtattagtgtggaagtttgacagcctcctagcatttcgtcacatggcccgagagctgcatccggagtactacaaagactgctgacatcgagctttctacaagggactttccgctggggactttccagggaggtgtggcctgggcgggactggggagtggcgagccctcagatgctacatataagcagctgctttttgcctgtactgggtctctctggttagaccagatctgagcctgggagctctctggctaactagggaacccactgcttaagcctcaataaagcttgccttgagtgctcaaagtagtgtgtgcccgtctgttgtgtgactctggtaactagagatccctcagacccttttagtcagtgtggaaaatctctagcagtggcgcccgaacagggacttgaaagcgaaagtaaagccagaggagatctctcgacgcaggactcggcttgctgaagcgcgcacggcaagaggcgaggggcggcgactggtgagtacgccaaaaattttgactagcggaggctagaaggagagagatgggtgcgagagcgtcggtattaagcgggggagaattagataaatgggaaaaaattcggttaaggccagggggaaagaaacaatataaactaaaacatatagtatgggcaagcagggagctagaacgattcgcagttaatcctggccttttagagacatcagaaggctgtagacaaatactgggacagctacaaccatcccttcagacaggatcagaagaacttagatcattatataatacaatagcagtcctctattgtgtgcatcaaaggatagatgtaaaagacaccaaggaagccttagataagatagaggaagagcaaaacaaaagtaagaaaaaggcacagcaagcagcagctgacacaggaaacaacagccaggtcagccaaaattaccctatagtgcagaacctccaggggcaaatggtacatcaggccatatcacctagaactttaaatgcatgggtaaaagtagtagaagagaaggctttcagcccagaagtaatacccatgttttcagcattatcagaaggagccaccccacaagatttaaataccatgctaaacacagtggggggacatcaagcagccatgcaaatgttaaaagagaccatcaatgaggaagctgcagaatgggatagattgcatccagtgcatgcagggcctattgcaccaggccagatgagagaaccaaggggaagtgacatagcaggaactactagtacccttcaggaacaaataggatggatgacacataatccacctatcccaaccgtccatgaagggttcgatggcgaccctcggccgtggactatggcaacggcagattcgttaaatgaatttgccaggaagatggaaaccaaaaatgatagggggaattggaggttttatcaaagtaagacagtatgatcagatactcatagaaatctgcggacataaagctataggtacagtattagtaggacctacacctgtcaacataattggaagaaatctgttgactcagattggctgcactttaaattttcccattagtcctattgagactgtaccagtaaaattaaagccaggaatggatggcccaaaagttaaacaatggccattgacagaagaaaaaataaaagcattagtagaaatttgtacagaaatggaaaaggaaggaaaaatttcaaaaattgggcctgaaaatccatacaatactccagtatttgccataaagaaaaaagacagtactaaatggagaaaattagtagatttcagagaacttaataagagaactcaagatttctgggaagttcaattaggaataccacatcctgcagggttaaaacagaaaaaatcagtaacagtactggatgtgggcgatgcatatttttcagttcccttagataaagacttcaggaagtatactgcatttaccatacctagtataaacaatgagacaccagggattagatatcagtacaatgtgcttccacagggatggaaaggatcaccagcaatattccagtgtagcatgacaaaaatcttagagccttttagaaaacaaaatccagacatagtcatctatcaatacatggatgatttgtatgtaggatctgacttagaaatagggcagcatagaacaaaaatagaggaactgagacaacatctgttgaggtggggatttaccacaccagacaaaaaacatcagaaagaacctccattcctttggatgggttatgaactccatcctgataaatggacagtacagcctatagtgctgccagaaaaggacagctggactgtcaatgacatacagaaattagtgggaaaattgaattgggcaagtcagatttatgcagggattaaagtaaggcaattatgtaaacttcttaggggaaccaaagcactaacagaagtagtaccactaacagaagaagcagagctagaactggcagaaaacagggagattctaaaagaaccggtacatggagtgtattatgacccatcaaaagacttaatagcagaaatacagaagcaggggcaaggccaatggacatatcaaatttatcaagagccatttaaaaatctgaaaacaggaaagtatgcaagaatgaacgaatctgccgttgccatatacagcatctgaacaagctgatcgaacccttcatggacggttaaggccgcctgttggtgggcggggatcaagcaggaatttggcattccctacaatccccaaagtcaaggagtaatagaatctatgaataaagaattaaagaaaattataggacaggtaagagatcaggctgaacatcttaagacagcagtacaaatggcagtattcatccacaattttaaaagaaaaggggggattggggggtacagtgcaggggaaagaatagtagacataatagcaacagacatacaaactaaagaattacaaaaacaaattacaaaaattcaaaattttcgggtttattacagggacagcagagatccagtttggaaaggaccagcaaagctcctctggaaaggtgaaggggcagtagtaatacaagataatagtgacataaaagtagtgccaagaagaaaagcaaagatcatcagggattatggaaaacagatggcaggtgatgattgtgtggcccgtccatgaagggttcgattcttgaacagcgcggtctgttatggcaacggcagattcgtttaatgcaacctataatagtagcaatagtagcattagtagtagcaataataatagcaatagttgtgtggtccatagtaatcatagaatataggaaaatattaagacaaagaaaaatagacaggttaattgatagactaatagaaagagcagaagacagtggcaatgagagtgaaggagaagtatcagcacttgtggagatgggggtggaaatggggcaccatgctccttgggatattgatgatctgtagtgctacagaaaaattgtgggtcacagtctattatggggtacctgtgtggaaggaagcaaccaccactctattttgtgcatcagatgctaaagcatatgatacagaggtacataatgtttgggccacacatgcctgtgtacccacagaccccaacccacaagaagtagtattggtaaatgtgacagaaaattttaacatgtggaaaaatgacatggtagaacagatgcatgaggatataatcagtttatgggatcaaagcctaaagccatgtgtaaaattaaccccactctgtgttagtttaaagtgcactgatttgaagaatgatactaataccaatagtagtagcgggagaatgataatggagaaaggagagataaaaaactgctctttcaatatcagcacaagcataagagataaggtgcagaaagaatatgcattcttttataaacttgatatagtaccaatagataataccagctataggttgataagttgtaacacctcagtcattacacaggcctgtccaaaggtatcctttgagccaattcccatacattattgtgccccggctggttttgcgattctaaaatgtaataataagacgttcaatggaacaggaccatgtacaaatgtcagcacagtacaatgtacacatggaatcaggccagtagtatcaactcaactgctgttaaatggcagtctagcagaagaagatgtagtaattagatctgccaatttcacagacaatgctaaaaccataatagtacagctgaacacatctgtagaaattaattgtacaagacccaacaacaatacaagaaaaagtatccgtatccagaggggaccagggagagcatttgttacaataggaaaaataggaaatatgagacaagcacattgtaacattagtagagcaaaatggaatgccactttaaaacagatagctagcaaattaagagaacaatttggaaataataaaacaataatctttaagcaatcctcaggaggggacccagaaattgtaacgcacagttttaattgtggaggggaatttttctactgtaattcaacacaactgtttaatagtacttggtttaatagtacttggagtactgaagggtcaaataacactgaaggaagtgacacaatcacactcccatgcagaataaaacaatttataaacatgtggcaggaagtaggaaaagcaatgtatgcccctcccatcagtggacaaattagatgttcatcaaatattactgggctgctattaacaagagatggtggtaataacaacaatgggtccgagatcttcagacctggaggaggcgatatgagggacaattggagaagtgaattatataaatataaagtagtaaaaattgaaccattaggagtagcacccaccaaggcaaagagaagagtggtgcagagagaaaaaagagcagtgggaataggagctttgttccttgggttcttgggagcagcaggaagcactatgggcgcagcgtcaatgacgctgacggtacaggccagacaattattgtctgatatagtgcagcagcagaacaatttgctgagggctattgaggcgcaacagcatctgttgcaactcacagtctggggcatcaaacagctccaggcaagaatcctggctgtggaaagatacctaaaggatcaacagctcctggggatttggggttgctctggaaaactcatttgcaccactgctgtgccttggaatgctagttggagtaataaatctctggaacagatttggaataacatgacctggatggagtgggacagagaaattaacaattacacaagcttaatacactccttaattgaagaatcgcaaaaccagcaagaaaagaatgaacaagaattattggaattagataaatgggcaagtttgtggaattggtttaacataacaaattggctgtggtatataaaattattcataatgatagtaggaggcttggtaggtttaagaatagtttttgctgtactttctatagtgaatagagttaggcagggatattcaccattatcgtttcagacccacctcccaatcccgaggggacccgacaggcccgaaggaatagaagaagaaggtggagagagagacagagacagatccattcgattagtgaacggatccttagcacttatctgggacgatctgcggagcctgtgcctcttcagctaccaccgcttgagagacttactcttgattgtaacgaggattgtggaacttctgggacgcagggggtgggaagccctcaaatattggtggaatctcctacagtattggagtcaggaactaaagaatagtgctgttaacttgctcaatgccacagccatagcagtagctgaggggacagatagggttatagaagtattacaagcagcttatagagctattcgccacatacctagaagaataagacagggcttggaaaggattttgctataagatgggtggcaagtggtcaaaaagtagtgtgattggatggcctgctgtaagggaaagaatgagacgagctgagccagcagcagatggggtgggagcagtatctcgagacctagaaaaacatggagcaatcacaagtagcaatacagcagctaacaatgctgcttgtgcctggctagaagcacaagaggaggaagaggtgggttttccagtcacacctcaggtacctttaagaccaatgacttacaaggcagctgtagatcttagccactttttaaaagaaaaggggggactggaagggctaattcactcccaaagaagacaagatatccttgatctgtggatctaccacacacaaggctacttccctgattggcagaactacacaccagggccaggggtcagatatccactgacctttggatggtgctacaagctagtaccagttgagccagataaggtagaagaggccaataaaggagagaacaccagcttgttacaccctgtgagcctgcatggaatggatgaccctgagagagaagtgttagagtggaggtttgacagccgcctagcatttcatcacgtggcccgagagctgcatccggagtacttcaagaactgctgacatcgagcttgctacaagggactttccgctggggactttccagggaggcgtggcctgggcgggactggggagtggcgagccctcagatgctgcatataagcagctgctttttgcctgtactgggtctctctggttagaccagatctgagcctgggagctctctggctaactagggaacccactgcttaagcctcaataaagcttgccttgagtgcttcaagtagtgtgtgcccgtctgttgtgtgactctggtaactagagatccctcagacccttttagtcagtgtggaaaatctctagca

SEQ ID NO: 116 - DNA, 6904 bp, Artificial Sequence
  Synthetic Sequence
tggaagggctaatttggtcccaaaaaagacaagagatccttgatctgtggatctaccacacacaaggctacttccctgattggcagaactacacaccagggccagggatcagatatccactgacctttggatggtgcttcaagttagtaccagttgaaccagagcaagtagaagaggccaatgaaggagagaacaacagcttgttacaccctatgagccagcatgggatggaggacccggagggagaagtattagtgtggaagtttgacagcctcctagcatttcgtcacatggcccgagagctgcatccggagtactacaaagactgctgacatcgagctttctacaagggactttccgctggggactttccagggaggtgtggcctgggcgggactggggagtggcgagccctcagatgctacatataagcagctgctttttgcctgtactgggtctctctggttagaccagatctgagcctgggagctctctggctaactagggaacccactgcttaagcctcaataaagcttgccttgagtgctcaaagtagtgtgtgcccgtctgttgtgtgactctggtaactagagatccctcagacccttttagtcagtgtggaaaatctctagcagtggcgcccgaacagggacttgaaagcgaaagtaaagccagaggagatctctcgacgcaggactcggcttgctgaagcgcgcacggcaagaggcgaggggcggcgactggtgagtacgccaaaaattttgactagcggaggctagaaggagagagatgggtgcgagagcgtcggtattaagcgggggagaattagataaatgggaaaaaattcggttaaggccagggggaaagaaacaatataaactaaaacatatagtatgggcaagcagggagctagaacgattcgcagttaatcctggccttttagagacatcagaaggctgtagacaaatactgggacagctacaaccatcccttcagacaggatcagaagaacttagatcattatataatacaatagcagtcctctattgtgtgcatcaaaggatagatgtaaaagacaccaaggaagccttagataagatagaggaagagcaaaacaaaagtaagaaaaaggcacagcaagcagcagctgacacaggaaacaacagccaggtcagccaaaattaccctatagtgcagaacctccaggggcaaatggtacatcaggccatatcacctagaactttaaatgcatgggtaaaagtagtagaagagaaggctttcagcccagaagtaatacccatgttttcagcattatcagaaggagccaccccacaagatttaaataccatgctaaacacagtggggggacatcaagcagccatgcaaatgttaaaagagaccatcaatgaggaagctgcagaatgggatagattgcatccagtgcatgcagggcctattgcaccaggccagatgagagaaccaaggggaagtgacatagcaggaactactagtacccttcaggaacaaataggatggatgacacataatccacctatcccaaccgtccatgaagggttcgatggcgaccctcggccgtggactatggcaacggcagattcgttaaatgaatttgccaggaagatggaaaccaaaaatgatagggggaattggaggttttatcaaagtaagacagtatgatcagatactcatagaaatctgcggacataaagctataggtacagtattagtaggacctacacctgtcaacataattggaagaaatctgttgactcagattggctgcactttaaattttcccattagtcctattgagactgtaccagtaaaattaaagccaggaatggatggcccaaaagttaaacaatggccattgacagaagaaaaaataaaagcattagtagaaatttgtacagaaatggaaaaggaaggaaaaatttcaaaaattgggcctgaaaatccatacaatactccagtatttgccataaagaaaaaagacagtactaaatggagaaaattagtagatttcagagaacttaataagagaactcaagatttctgggaagttcaattaggaataccacatcctgcagggttaaaacagaaaaaatcagtaacagtactggatgtgggcgatgcatatttttcagttcccttagataaagacttcaggaagtatactgcatttaccatacctagtataaacaatgagacaccagggattagatatcagtacaatgtgcttccacagggatggaaaggatcaccagcaatattccagtgtagcatgacaaaaatcttagagccttttagaaaacaaaatccagacatagtcatctatcaatacatggatgatttgtatgtaggatctgacttagaaatagggcagcatagaacaaaaatagaggaactgagacaacatctgttgaggtggggatttaccacaccagacaaaaaacatcagaaagaacctccattcctttggatgggttatgaactccatcctgataaatggacagtacagcctatagtgctgccagaaaaggacagctggactgtcaatgacatacagaaattagtgggaaaattgaattgggcaagtcagatttatgcagggattaaagtaaggcaattatgtaaacttcttaggggaaccaaagcactaacagaagtagtaccactaacagaagaagcagagctagaactggcagaaaacagggagattctaaaagaaccggtacatggagtgtattatgacccatcaaaagacttaatagcagaaatacagaagcaggggcaaggccaatggacatatcaaatttatcaagagccatttaaaaatctgaaaacaggaaagtatgcaagaatgaacgaatctgccgttgccatatacagcatctgaacaagctgatcgaacccttcatggacggttaaggccgcctgttggtgggcggggatcaagcaggaatttggcattccctacaatccccaaagtcaaggagtaatagaatctatgaataaagaattaaagaaaattataggacaggtaagagatcaggctgaacatcttaagacagcagtacaaatggcagtattcatccacaattttaaaagaaaaggggggattggggggtacagtgcaggggaaagaatagtagacataatagcaacagacatacaaactaaagaattacaaaaacaaattacaaaaattcaaaattttcgggtttattacagggacagcagagatccagtttggaaaggaccagcaaagctcctctggaaaggtgaaggggcagtagtaatacaagataatagtgacataaaagtagtgccaagaagaaaagcaaagatcatcagggattaaccgtccatgaagggttcgattatctgtagccaacattcgatatggcaacggcagattcgttggagatgggggtggaaatggggcaccatgctccttgggatattgatgatctgtagtgctacagaaaaattgtgggtcacagtctattatggggtacctgtgtggaaggaagcaaccaccactctattttgtgcatcagatgctaaagcatatgatacagaggtacataatgtttgggccacacatgcctgtgtacccacagaccccaacccacaagaagtagtattggtaaatgtgacagaaaattttaacatgtggaaaaatgacatggtagaacagatgcatgaggatataatcagtttatgggatcaaagcctaaagccatgtgtaaaattaaccccactctgtgttagtttaaagtgcactgatttgaagaatgatactaataccaatagtagtagcgggagaatgataatggagaaaggagagataaaaaactgctctttcaatatcagcacaagcataagagataaggtgcagaaagaatatgcattcttttataaacttgatatagtaccaatagataataccagctataggttgataagttgtaacacctcagtcattacacaggcctgtccaaaggtatcctttgagccaattcccatacattattgtgccccggctggttttgcgattctaaaatgtaataataagacgttcaatggaacaggaccatgtacaaatgtcagcacagtacaatgtacacatggaatcaggccagtagtatcaactcaactgctgttaaatggcagtctagcagaagaagatgtagtaattagatctgccaatttcacagacaatgctaaaaccataatagtacagctgaacacatctgtagaaattaattgtacaagacccaacaacaatacaagaaaaagtatccgtatccagaggggaccagggagagcatttgttacaataggaaaaataggaaatatgagacaagcacattgtaacattagtagagcaaaatggaatgccactttaaaacagatagctagcaaattaagagaacaatttggaaataataaaacaataatctttaagcaatcctcaggaggggacccagaaattgtaacgcacagttttaattgtggaggggaatttttctactgtaattcaacacaactgtttaatagtacttggtttaatagtacttggagtactgaagggtcaaataacactgaaggaagtgacacaatcacactcccatgcagaataaaacaatttataaacatgtggcaggaagtaggaaaagcaatgtatgcccctcccatcagtggacaaattagatgttcatcaaatattactgggctgctattaacaagagatggtggtaataacaacaatgggtccgagatcttcagacctggaggaggcgatatgagggacaattggagaagtgaattatataaatataaagtagtaaaaattgaaccattaggagtagcacccaccaaggcaaagagaagagtggtgcagagagaaaaaagagcagtgggaataggagctttgttccttgggttcttgggagcagcaggaagcactatgggcgcagcgtcaatgacgctgacggtacaggccagacaattattgtctgatatagtgcagcagcagaacaatttgctgagggctattgaggcgcaacagcatctgttgcaactcacagtctggggcatcaaacagctccaggcaagaatcctggctgtggaaagatacctaaaggatcaacagctcctggggatttggggttgctctggaaaactcatttgcaccactgctgtgccttggaatgctagttggagtaataaatctctggaacagatttggaataacatgacctggatggagtgggacagagaaattaacaattacacaagcttaatacactccttaattgaagaatcgcaaaaccagcaagaaaagaatgaacaagaattattggaattagataaatgggcaagtttgtggaattggtttaacataacaaattggctgtggtatataaaattattcataatgatagtaggaggcttggtaggtttaagaatagtttttgctgtactttctatagtgaatagagttaggcagggatattcaccattatcgtttcagacccacctcccaatcccgaggggacccgacaggcccgaaggaatagaagaagaaggtggagagagagacagagacagatccattcgattagtgaacggatccttagcacttatctgggacgatctgcggagcctgtgcctcttcagctaccaccgcttgagagacttactcttgattgtaacgaggattgtggaacttctgggacgcagggggtgggaagccctcaaatattggtggaatctcctacagtattggagtcaggaactaaagaatagtgctgttaacttgctcaatgccacagccatagcagtagctgaggggacagatagggttatagaagtattacaagcagcttatagagctattcgccacatacctagaagaataagacagggcttggaaaggattttgctataagatgggtggcaagtggtcaaaaagtagtgtgattggatggcctgctgtaagggaaagaatgagacgagctgagccagcagcagatggggtgggagcagtatctcgagacctagaaaaacatggagcaatcacaagtagcaatacagcagctaacaatgctgcttgtgcctggctagaagcacaagaggaggaagaggtgggttttccagtcacacctcaggtacctttaagaccaatgacttacaaggcagctgtagatcttagccactttttaaaagaaaaggggggactggaagggctaattcactcccaaagaagacaagatatccttgatctgtggatctaccacacacaaggctacttccctgattggcagaactacacaccagggccaggggtcagatatccactgacctttggatggtgctacaagctagtaccagttgagccagataaggtagaagaggccaataaaggagagaacaccagcttgttacaccctgtgagcctgcatggaatggatgaccctgagagagaagtgttagagtggaggtttgacagccgcctagcatttcatcacgtggcccgagagctgcatccggagtacttcaagaactgctgacatcgagcttgctacaagggactttccgctggggactttccagggaggcgtggcctgggcgggactggggagtggcgagccctcagatgctgcatataagcagctgctttttgcctgtactgggtctctctggttagaccagatctgagcctgggagctctctggctaactagggaacccactgcttaagcctcaataaagcttgccttgagtgcttcaagtagtgtgtgcccgtctgttgtgtgactctggtaactagagatccctcagacccttttagtcagtgtggaaaatctctagca

SEQ ID NO: 117 - DNA, 27 bp, Artificial Sequence
  Synthetic Sequence
  Misc_feature (1)..(1): There is a phosphate group at the 5' end
ctgtctcttatacacatctgcggccgc

SEQ ID NO: 118 - DNA, 36 bp, Artificial Sequence
  Synthetic Sequence
  Misc_feature (1)..(1): There is a phosphate group at the 5' end
ctgtctcttatacacatctttaattaattcgctacc

SEQ ID NO: 119 - DNA, 20 bp, Artificial Sequence
  Synthetic Sequence
ccgtccatgaagggttcgat

SEQ ID NO: 120 - DNA, 20 bp, Artificial Sequence
  Synthetic Sequence
acgaatctgccgttgccata

SEQ ID NO: 121 - DNA, 60 bp, Artificial Sequence; identical to SEQ ID NO: 9
  Synthetic Sequence
  Misc_feature (21)..(40): n is a, c, g, or t

SEQ ID NO: 122 - DNA, 24 bp, Artificial Sequence
  Synthetic Sequence
tctagagtcgacctgcaggcatgc

SEQ ID NO: 123 - DNA, 24 bp, Artificial Sequence
  Synthetic Sequence
ccgggtaccgagctcgaattcact

SEQ ID NO: 124 - DNA, 20 bp, Artificial Sequence
  Synthetic Sequence
gagacagggcaagaaacagc

SEQ ID NO: 125 - DNA, 20 bp, Artificial Sequence
  Synthetic Sequence
aacaggcggccttaactgta

SEQ ID NO: 126 - DNA, 22 bp, Artificial Sequence
  Synthetic Sequence
tcctgctcaacttcctgtcgag

SEQ ID NO: 127 - DNA, 22 bp, Artificial Sequence
  Synthetic Sequence
caggtcaaacctcctaggaatg

SEQ ID NO: 128 - DNA, 21 bp, Artificial Sequence
  Synthetic Sequence
agtgtaaagcctggggtgcct

SEQ ID NO: 129 - DNA, 21 bp, Artificial Sequence
  Synthetic Sequence
tgactgggaaaaccctggcgt

SEQ ID NO: 130 - DNA, 20 bp, Artificial Sequence
  Synthetic Sequence
attgcgttgcgctcactgcc

SEQ ID NO: 131 - DNA, 19 bp, Artificial Sequence
  Synthetic Sequence
gcccttcccaacagttgcg

SEQ ID NO: 132 - DNA, 60 bp, Artificial Sequence
  Synthetic Sequence
ttgtaaaacgacggccagtgaattcgagctcggtacccggaggcctccacctgggtcttg

SEQ ID NO: 133 - DNA, 81 bp, Artificial Sequence
  Synthetic Sequence
gcggccgcaggcgattaagttgggtaacgccagggttttcccagtcacggcgcgccttgtaaaacgacggccagtgaattc

SEQ ID NO: 134 - DNA, 48 bp, Artificial Sequence
  Synthetic Sequence
gcggccgcaggccctgcatgcactggatgcaatctatcccattctgca

SEQ ID NO: 135 - DNA, 48 bp, Artificial Sequence
  Synthetic Sequence
gcggccgctgcagaatgggatagattgcatccagtgcatgcagggcct

SEQ ID NO: 136 - DNA, 48 bp, Artificial Sequence
  Synthetic Sequence
gcggccgcagctgtccttttctggcagcactataggctgtactgtcca

SEQ ID NO: 137 - DNA, 48 bp, Artificial Sequence
  Synthetic Sequence
gcggccgctggacagtacagcctatagtgctgccagaaaaggacagct

SEQ ID NO: 138 - DNA, 73 bp, Artificial Sequence
  Synthetic Sequence
cattaggcaccccaggctttacactggcgcgccatcttgtattactactgccccttcacctttccagaggagc

SEQ ID NO: 139 - DNA, 48 bp, Artificial Sequence
  Synthetic Sequence
gcggccgcgtgagttagctcactcattaggcaccccaggctttacact

SEQ ID NO: 140 - DNA, 88 bp, Artificial Sequence
  Synthetic Sequence
aggcgattaagttgggtaacgccagggttttcccagtcacggcgcgccgctcctctggaaaggtgaaggggcagtagtaatacaagat

SEQ ID NO: 141 - DNA, 88 bp, Artificial Sequence
  Synthetic Sequence
gtgagttagctcactcattaggcaccccaggctttacactggcgcgcccatttaccaatactacttcttgtgggttggggtctgtggg

SEQ ID NO: 142 - DNA, 73 bp, Artificial Sequence
  Synthetic Sequence
gtaacgccagggttttcccagtcacggcgcgcccccacagaccccaacccacaagaagtagtattggtaaatg

SEQ ID NO: 143 - DNA, 48 bp, Artificial Sequence
  Synthetic Sequence
gcggccgcaggcgattaagttgggtaacgccagggttttcccagtcac

SEQ ID NO: 144 - DNA, 48 bp, Artificial Sequence
  Synthetic Sequence
gcggccgcgcacaggctccgcagatcgtcccagataagtgctaaggat

SEQ ID NO: 145 - DNA, 48 bp, Artificial Sequence
  Synthetic Sequence
gcggccgcatccttagcacttatctgggacgatctgcggagcctgtgc

SEQ ID NO: 146 - DNA, 48 bp, Artificial Sequence
  Synthetic Sequence
gcggccgcgcagctctcgggccacgtgatgaaatgctaggcggctgtc

SEQ ID NO: 147 - DNA, 48 bp, Artificial Sequence
  Synthetic Sequence
gcggccgcgacagccgcctagcatttcatcacgtggcccgagagctgc

SEQ ID NO: 148 - DNA, 60 bp, Artificial Sequence
  Synthetic Sequence
tgattacgccaagcttgcatgcctgcaggtcgactctagagcgcgatcttggctcactgc

SEQ ID NO: 149 - DNA, 81 bp, Artificial Sequence
  Synthetic Sequence
gcggccgcgtgagttagctcactcattaggcaccccaggctttacactggcgcgcctgattacgccaagcttgcatgcctg

SEQ ID NO: 150 - DNA, 22 bp, Artificial Sequence
  Synthetic Sequence
gcatccagtgcatgcagggcct

SEQ ID NO: 151 - DNA, 28 bp, Artificial Sequence
  Synthetic Sequence
ctggcagcactataggctgtactgtcca

SEQ ID NO: 152 - DNA, 28 bp, Artificial Sequence
  Synthetic Sequence
tggacagtacagcctatagtgctgccag

SEQ ID NO: 153 - DNA, 29 bp, Artificial Sequence
  Synthetic Sequence
ctactgccccttcacctttccagaggagc

SEQ ID NO: 154 - DNA, 29 bp, Artificial Sequence
  Synthetic Sequence
gctcctctggaaaggtgaaggggcagtag

SEQ ID NO: 155 - DNA, 28 bp, Artificial Sequence
  Synthetic Sequence
ctacttcttgtgggttggggtctgtggg

SEQ ID NO: 156 - DNA, 28 bp, Artificial Sequence
  Synthetic Sequence
cccacagaccccaacccacaagaagtag

SEQ ID NO: 157 - DNA, 28 bp, Artificial Sequence
  Synthetic Sequence
ggctccgcagatcgtcccagataagtgc

SEQ ID NO: 158 - DNA, 28 bp, Artificial Sequence
  Synthetic Sequence
gcacttatctgggacgatctgcggagcc

SEQ ID NO: 159 - DNA, 26 bp, Artificial Sequence
  Synthetic Sequence
ggccacgtgatgaaatgctaggcggc

SEQ ID NO: 160 - DNA, 26 bp, Artificial Sequence
  Synthetic Sequence
gccgcctagcatttcatcacgtggcc

SEQ ID NO: 161 - DNA, 22 bp, Artificial Sequence
  Synthetic Sequence
tgggacagctacaaccatccct

SEQ ID NO: 162 - DNA, 20 bp, Artificial Sequence
  Synthetic Sequence
gctgctgcttgctgtgcctt
